(19) United States
(12) Patent Application Publication
(10) Pub. No.: US 2025/0263702 A1
(43) Pub. Date: Aug. 21, 2025

(54) RNAI AGENTS TARGETING CIDEB AND RELATED METHODS

(71) Applicant: FLAGSHIP PIONEERING INNOVATIONS VII, LLC, Cambridge, MA (US)

(72) Inventors: Scott Joseph HAYTON, Toronto (CA); Janno HARJES, Thurnau (DE); Kathrin Stefanie GERAUER, Prichsenstadt (DE); Monika KRAMPERT, Bamberg (DE); Jose Antonio Fidel CHAVEZ REATEGUI, Doylestown, PA (US); Luciano Henrique APPONI, Lynn, MA (US); David Charles BLAKEY, Prestbury (GB); Janeta Valentina POPOVICI-MULLER, Windham, NH (US)

(21) Appl. No.: 19/055,667

(22) Filed: Feb. 18, 2025

Related U.S. Application Data
(60) Provisional application No. 63/555,164, filed on Feb. 19, 2024.
(60) Provisional application No. 63/635,269, filed on Apr. 17, 2024.
(60) Provisional application No. 63/707,351, filed on Oct. 15, 2024.

(51) Int. Cl. C12N 15/113

(52) U.S. Cl. CPC C12N 15/113; C12N 2310/14; C12N 2310/351

(57) ABSTRACT

Provided herein are, inter alia, agents (e.g., RNAi agents, dsRNA agents) comprising a sense strand and an antisense strand targeting CIDEB (e.g., hCIDEB); and methods of manufacturing and pharmaceutical compositions comprising the same. Further provided herein are methods of utilizing the agents (e.g., RNAi agents, dsRNA agents) including, e.g., methods of inhibiting or decreasing CIDEB expression (e.g., mRNA expression), methods of treating CIDEB associated diseases, and methods of treating liver diseases (e.g., MASH).

### RELATED APPLICATIONS

[0001] This application claims priority to U.S. Ser. No.: 63/555,164, filed Feb. 19, 2024, U.S. Ser. No. 63/635,269, filed Apr. 17, 2024, and U.S. Ser. No. 63/707,351, filed Oct. 15, 2024, the entire contents of each of which is incorporated herein by reference.

### SEQUENCE LISTING

[0002] The instant application contains a Sequence Listing which has been submitted electronically in XML format and is hereby incorporated by reference in its entirety. Said XML copy, created on May 5, 2025, is named 62801.53US01 Sequence Listing.xml and is 6,883,805 bytes in size.

### 1. FIELD

[0003] This disclosure relates to RNAi agents (e.g., double stranded RNA (dsRNA) agents comprising a sense strand and an antisense strand) targeting cell death inducing DNA fragmentation factor alpha like effector B (CIDEB). The disclosure further relates to pharmaceutical compositions comprising the same; and methods of utilizing the same, including, e.g., methods of treating CIDEB associated diseases (e.g., liver diseases).

### 2. BACKGROUND

[0004] The CIDE (cell death inducing DNA fragmentation factor alpha like effector) protein family is a family of lipid droplet-associated proteins. There are three members of the CIDE protein family, CIDEA, CIDEB, and CIDEC. Each of the CIDE proteins comprises a common CIDE-N domain and a CIDE-C domain, which varies between each of the members. The tissue expression pattern of each CIDE protein differs but is correlative with their association with lipid droplets-CIDEA and CIDEC are primarily expressed in adipose tissue, while CIDEB is highly expressed in the liver. The association of CIDE proteins with lipid droplets can be a direct physical interaction with the surface of the lipid droplet, as well as an association with other lipid droplet proteins, such as perilipin.

### 3. SUMMARY

[0005] Provided herein are, inter alia, agents (e.g., RNAi agents, dsRNA agents) comprising a sense strand and an antisense strand targeting CIDEB (e.g., hCIDEB); and methods of manufacturing and pharmaceutical compositions comprising the same. Further provided herein are methods of utilizing the agents (e.g., RNAi agents, dsRNA agents) including, e.g., methods of inhibiting or decreasing CIDEB expression (e.g., mRNA expression), methods of treating CIDEB associated diseases, and methods of treating liver diseases (e.g., metabolic dysfunction-associated steatohepatitis (MASH)).

[0006] Accordingly, in one aspect provided herein are double stranded ribonucleic acid (dsRNA) agents for inhibiting expression of cell death inducing DNA fragmentation factor alpha like effector (CIDEB) (e.g., human CIDEB (hCIDEB)), wherein the dsRNA agent comprises a sense strand and an antisense strand forming a double stranded region, wherein the nucleotide sequence of the antisense strand differs by no more than 5 (e.g., 0, 1, 2, 3, 4, or 5) nucleotides from the nucleotide sequence of any one of the antisense strands set forth in Table 2 or Table 3 or set forth in any one of SEQ ID NOS: 187-369, 602-657, 893-1131, or 1188-1191.

[0007] In some embodiments, the nucleotide sequence of the sense strand differs by no more than 5 (e.g., 0, 1, 2, 3, 4, or 5) nucleotides from the nucleotide sequence of the corresponding sense strand set forth in Table 2 or Table 3 or the corresponding sense strand set forth in one of SEQ ID NOS: 4-186, 553-601, 658-892, or 1192.

[0008] In some embodiments, the nucleotide sequence of the antisense strand differs by no more than 3 (e.g., 0, 1, 2, or 3) nucleotides from the nucleotide sequence of any one of the antisense strands set forth in Table 2 or Table 3 or set forth in any one of SEQ ID NOS: 187-369, 602-657, 893-1131, or 1188-1191; and the nucleotide sequence of the sense strand differs by no more than 3 (e.g., 0, 1, 2, or 3) nucleotides from the nucleotide sequence of the corresponding sense strand set forth in Table 2 or Table 3 or the corresponding sense strand set forth in one of SEQ ID NOS: 4-186, 553-601, 658-892, or 1192.

[0009] In some embodiments, the nucleotide sequence of the antisense strand comprises the nucleotide sequence of any one of the antisense strands set forth in Table 2 or Table 3 or set forth in any one of SEQ ID NOS: 187-369, 602-657, 893-1131, or 1188-1191; and the nucleotide sequence of the sense strand comprises the nucleotide sequence of the corresponding sense strand set forth in Table 2 or Table 3 or the corresponding sense strand set forth in one of SEQ ID NOS: 4-186, 553-601, 658-892, or 1192.

[0010] In some embodiments, (a) the nucleotide sequence of the antisense strand differs by no more than 5 (e.g., 0, 1, 2, 3, 4, or 5) nucleotides from the nucleotide sequence set forth in SEQ ID NO: 355; and the nucleotide sequence of the sense strand differs by no more than 5 (e.g., 0, 1, 2, 3, 4, or 5) nucleotides from the nucleotide sequence set forth in SEQ ID NO: 172; (b) the nucleotide sequence of the antisense strand differs by no more than 5 (e.g., 0, 1, 2, 3, 4, or 5) nucleotides from the nucleotide sequence set forth in SEQ ID NO: 315; and the nucleotide sequence of the sense strand differs by no more than 5 (e.g., 0, 1, 2, 3, 4, or 5) nucleotides from the nucleotide sequence set forth in SEQ ID NO: 132; (c) the nucleotide sequence of the antisense strand differs by no more than 5 (e.g., 0, 1, 2, 3, 4, or 5) nucleotides from the nucleotide sequence set forth in SEQ ID NO: 356; and the nucleotide sequence of the sense strand differs by no more than 5 (e.g., 0, 1, 2, 3, 4, or 5) nucleotides from the nucleotide sequence set forth in SEQ ID NO: 173; or (d) the nucleotide sequence of the antisense strand differs by no more than 5 (e.g., 0, 1, 2, 3, 4, or 5) nucleotides from the nucleotide sequence set forth in SEQ ID NO: 321; and the nucleotide sequence of the sense strand differs by no more than 5 (e.g., 0, 1, 2, 3, 4, or 5) nucleotides from the nucleotide sequence set forth in SEQ ID NO: 138.

[0011] In some embodiments, (a) the nucleotide sequence of the antisense strand differs by no more than 3 (e.g., 0, 1, 2, or 3) nucleotides from the nucleotide sequence set forth in SEQ ID NO: 355; and the nucleotide sequence of the sense strand differs by no more than 3 (e.g., 0, 1, 2, or 3) nucleotides from the nucleotide sequence set forth in SEQ ID NO: 172; (b) the nucleotide sequence of the antisense strand differs by no more than 3 (e.g., 0, 1, 2, or 3) nucleotides from the nucleotide sequence set forth in SEQ ID NO: 315; and the nucleotide sequence of the sense strand differs by no more than 3 (e.g., 0, 1, 2, or 3) nucleotides from the nucleotide sequence set forth in SEQ ID NO: 132; (c) the nucleotide sequence of the antisense strand differs by no more than 3 (e.g., 0, 1, 2, or 3) nucleotides from the nucleotide sequence set forth in SEQ ID NO: 356; and the nucleotide sequence of the sense strand differs by no more than 3 (e.g., 0, 1, 2, or 3) nucleotides from the nucleotide sequence set forth in SEQ ID NO: 173; or (d) the nucleotide sequence of the antisense strand differs by no more than 3 (e.g., 0, 1, 2, or 3) nucleotides from the nucleotide sequence set forth in SEQ ID NO: 321; and the nucleotide sequence of the sense strand differs by no more than 3 (e.g., 0, 1, 2, or 3) nucleotides from the nucleotide sequence set forth in SEQ ID NO: 138.

[0012] In some embodiments, (a) the nucleotide sequence of the antisense strand comprises the nucleotide sequence set forth in SEQ ID NO: 355; and the nucleotide sequence of the sense strand comprises the nucleotide sequence set forth in SEQ ID NO: 172; (b) the nucleotide sequence of the antisense strand comprises the nucleotide sequence set forth in SEQ ID NO: 315; and the nucleotide sequence of the sense strand comprises the nucleotide sequence set forth in SEQ ID NO: 132; (c) the nucleotide sequence of the antisense strand comprises the nucleotide sequence set forth in SEQ ID NO: 356; and the nucleotide sequence of the sense strand comprises the nucleotide sequence set forth in SEQ ID NO: 173; or (d) the nucleotide sequence of the antisense strand comprises the nucleotide sequence set forth in SEQ ID NO: 321; and the nucleotide sequence of the sense strand comprises the nucleotide sequence set forth in SEQ ID NO: 138.

[0013] In some embodiments, (a) the nucleotide sequence of the antisense strand differs by no more than 5 (e.g., 0, 1, 2, 3, 4, or 5) nucleotides from the nucleotide sequence set forth in SEQ ID NO: 1191; and the nucleotide sequence of the sense strand differs by no more than 5 (e.g., 0, 1, 2, 3, 4, or 5) nucleotides from the nucleotide sequence set forth in SEQ ID NO: 1192; (b) the nucleotide sequence of the antisense strand differs by no more than 5 (e.g., 0, 1, 2, 3, 4, or 5) nucleotides from the nucleotide sequence set forth in SEQ ID NO: 1188; and the nucleotide sequence of the sense strand differs by no more than 5 (e.g., 0, 1, 2, 3, 4, or 5) nucleotides from the nucleotide sequence set forth in SEQ ID NO: 786; (c) the nucleotide sequence of the antisense strand differs by no more than 5 (e.g., 0, 1, 2, 3, 4, or 5) nucleotides from the nucleotide sequence set forth in SEQ ID NO: 1190; and the nucleotide sequence of the sense strand differs by no more than 5 (e.g., 0, 1, 2, 3, 4, or 5) nucleotides from the nucleotide sequence set forth in SEQ ID NO: 786; (d) the nucleotide sequence of the antisense strand differs by no more than 5 (e.g., 0, 1, 2, 3, 4, or 5) nucleotides from the nucleotide sequence set forth in SEQ ID NO: 1062; and the nucleotide sequence of the sense strand differs by no more than 5 (e.g., 0, 1, 2, 3, 4, or 5) nucleotides from the nucleotide sequence set forth in SEQ ID NO: 827; or (e) the nucleotide sequence of the antisense strand differs by no more than 5 (e.g., 0, 1, 2, 3, 4, or 5) nucleotides from the nucleotide sequence set forth in SEQ ID NO: 1189; and the nucleotide sequence of the sense strand differs by no more than 5 (e.g., 0, 1, 2, 3, 4, or 5) nucleotides from the nucleotide sequence set forth in SEQ ID NO: 792.

[0014] In some embodiments, (a) the nucleotide sequence of the antisense strand differs by no more than 3 (e.g., 0, 1, 2, or 3) nucleotides from the nucleotide sequence set forth in SEQ ID NO: 1191; and the nucleotide sequence of the sense strand differs by no more than 3 (e.g., 0, 1, 2, or 3) nucleotides from the nucleotide sequence set forth in SEQ ID NO: 1192; (b) the nucleotide sequence of the antisense strand differs by no more than 3 (e.g., 0, 1, 2, or 3) nucleotides from the nucleotide sequence set forth in SEQ ID NO: 1188; and the nucleotide sequence of the sense strand differs by no more than 3 (e.g., 0, 1, 2, or 3) nucleotides from the nucleotide sequence set forth in SEQ ID NO: 786; (c) the nucleotide sequence of the antisense strand differs by no more than 3 (e.g., 0, 1, 2, or 3) nucleotides from the nucleotide sequence set forth in SEQ ID NO: 1190; and the nucleotide sequence of the sense strand differs by no more than 3 (e.g., 0, 1, 2, or 3) nucleotides from the nucleotide sequence set forth in SEQ ID NO: 786; (d) the nucleotide sequence of the antisense strand differs by no more than 3 (e.g., 0, 1, 2, or 3) nucleotides from the nucleotide sequence set forth in SEQ ID NO: 1062; and the nucleotide sequence of the sense strand differs by no more than 3 (e.g., 0, 1, 2, or 3) nucleotides from the nucleotide sequence set forth in SEQ ID NO: 827; or (c) the nucleotide sequence of the antisense strand differs by no more than 3 (e.g., 0, 1, 2, or 3) nucleotides from the nucleotide sequence set forth in SEQ ID NO: 1189; and the nucleotide sequence of the sense strand differs by no more than 3 (e.g., 0, 1, 2, or 3) nucleotides from the nucleotide sequence set forth in SEQ ID NO: 792.

[0015] In some embodiments, (a) the nucleotide sequence of the antisense strand comprises the nucleotide sequence set forth in SEQ ID NO: 1191; and the nucleotide sequence of the sense strand comprises the nucleotide sequence set forth in SEQ ID NO: 1192; (b) the nucleotide sequence of the antisense strand comprises the nucleotide sequence set forth in SEQ ID NO: 1188; and the nucleotide sequence of the sense strand comprises the nucleotide sequence set forth in SEQ ID NO: 786; (c) the nucleotide sequence of the antisense strand comprises the nucleotide sequence set forth in SEQ ID NO: 1190; and the nucleotide sequence of the sense strand comprises the nucleotide sequence set forth in SEQ ID NO: 786; (d) the nucleotide sequence of the antisense strand comprises the nucleotide sequence set forth in SEQ ID NO: 1062; and the nucleotide sequence of the sense strand comprises the nucleotide sequence set forth in SEQ ID NO: 827; or (c) the nucleotide sequence of the antisense strand comprises the nucleotide sequence set forth in SEQ ID NO: 1189; and the nucleotide sequence of the sense strand comprises the nucleotide sequence set forth in SEQ ID NO: 792.

[0016] In one aspect, provided herein are dsRNA agents for inhibiting expression of CIDEB (e.g., hCIDEB), wherein the dsRNA agent comprises a sense strand and an antisense strand forming a double stranded region, and wherein the nucleotide sequence of the antisense strand differs by no more than 5 (e.g., 0, 1, 2, 3, 4, or 5) nucleotides from the nucleotide sequence of any one of the antisense strands of any one of dsRNA agents 1-482 set forth in Table 2 or Table 3; and the nucleotide sequence of the sense strand differs by no more than 5 (e.g., 0, 1, 2, 3, 4, or 5) nucleotides from the nucleotide sequence of the sense strand of the corresponding dsRNA agent set forth in Table 2 or Table 3.

[0017] In some embodiments, the nucleotide sequence of the antisense strand differs by no more than 3 (e.g., 0, 1, 2, or 3) nucleotides from the nucleotide sequence of any one of the antisense strands of any one of dsRNA agents 1-482 set forth in Table 2 or Table 3; and the nucleotide sequence of the sense strand differs by no more than 3 (e.g., 0, 1, 2, or 3) nucleotides from the nucleotide sequence of the sense strand of the corresponding dsRNA agent set forth in Table 2 or Table 3.

[0018] In some embodiments, (a) the nucleotide sequence of the antisense strand differs by no more than 5 (e.g., 0, 1, 2, 3, 4, or 5) nucleotides from the nucleotide sequence of the antisense strand of dsRNA agent 129; and the nucleotide sequence of the sense strand differs by no more than 5 (e.g., 0, 1, 2, 3, 4, or 5) nucleotides from the nucleotide sequence of dsRNA agent 129; (b) the nucleotide sequence of the antisense strand differs by no more than 5 (e.g., 0, 1, 2, 3, 4, or 5) nucleotides from the nucleotide sequence of the antisense strand of dsRNA agent 135; and the nucleotide sequence of the sense strand differs by no more than 5 (e.g., 0, 1, 2, 3, 4, or 5) nucleotides from the nucleotide sequence of dsRNA agent 135; (c) the nucleotide sequence of the antisense strand differs by no more than 5 (e.g., 0, 1, 2, 3, 4, or 5) nucleotides from the nucleotide sequence of the antisense strand of dsRNA agent 169; and the nucleotide sequence of the sense strand differs by no more than 5 (e.g., 0, 1, 2, 3, 4, or 5) nucleotides from the nucleotide sequence of dsRNA agent 169; or (d) the nucleotide sequence of the antisense strand differs by no more than 5 (e.g., 0, 1, 2, 3, 4, or 5) nucleotides from the nucleotide sequence of the antisense strand of dsRNA agent 170; and the nucleotide sequence of the sense strand differs by no more than 5 (e.g., 0, 1, 2, 3, 4, or 5) nucleotides from the nucleotide sequence of dsRNA agent 170.

[0019] In some embodiments, (a) the nucleotide sequence of the antisense strand differs by no more than 3 (e.g., 0, 1, 2, or 3) nucleotides from the nucleotide sequence of the antisense strand of dsRNA agent 129; and the nucleotide sequence of the sense strand differs by no more than 3 (e.g., 0, 1, 2, or 3) nucleotides from the nucleotide sequence of dsRNA agent 129; (b) the nucleotide sequence of the antisense strand differs by no more than 3 (e.g., 0, 1, 2, or 3) nucleotides from the nucleotide sequence of the antisense strand of dsRNA agent 135; and the nucleotide sequence of the sense strand differs by no more than 3 (e.g., 0, 1, 2, or 3) nucleotides from the nucleotide sequence of dsRNA agent 135; (c) the nucleotide sequence of the antisense strand differs by no more than 3 (e.g., 0, 1, 2, or 3) nucleotides from the nucleotide sequence of the antisense strand of dsRNA agent 169; and the nucleotide sequence of the sense strand differs by no more than 3 (e.g., 0, 1, 2, or 3) nucleotides from the nucleotide sequence of dsRNA agent 169; or (d) the nucleotide sequence of the antisense strand differs by no more than 3 (e.g., 0, 1, 2, or 3) nucleotides from the nucleotide sequence of the antisense strand of dsRNA agent 170; and the nucleotide sequence of the sense strand differs by no more than 3 (e.g., 0, 1, 2, or 3) nucleotides from the nucleotide sequence of dsRNA agent 170.

[0020] In some embodiments, (a) the nucleotide sequence of the antisense strand comprises the nucleotide sequence of the antisense strand of dsRNA agent 129; and the nucleotide sequence of the sense strand comprises of the sense strand of dsRNA agent 129; (b) the nucleotide sequence of the antisense strand comprises the nucleotide sequence of the antisense strand of dsRNA agent 135; and the nucleotide sequence of the sense strand comprises of the sense strand of dsRNA agent 135; (c) the nucleotide sequence of the antisense strand comprises the nucleotide sequence of the antisense strand of dsRNA agent 169; and the nucleotide sequence of the sense strand comprises of the sense strand of dsRNA agent 169; or (d) the nucleotide sequence of the antisense strand comprises the nucleotide sequence of the antisense strand of dsRNA agent 170; and the nucleotide sequence of the sense strand comprises of the sense strand of dsRNA agent 170.

[0021] In some embodiments, (a) the nucleotide sequence of the antisense strand differs by no more than 5 (e.g., 0, 1, 2, 3, 4, or 5) nucleotides from the nucleotide sequence of the antisense strand of dsRNA agent 479; and the nucleotide sequence of the sense strand differs by no more than 5 (e.g., 0, 1, 2, 3, 4, or 5) nucleotides from the nucleotide sequence of dsRNA agent 479; (b) the nucleotide sequence of the antisense strand differs by no more than 5 (e.g., 0, 1, 2, 3, 4, or 5) nucleotides from the nucleotide sequence of the antisense strand of dsRNA agent 481; and the nucleotide sequence of the sense strand differs by no more than 5 (e.g., 0, 1, 2, 3, 4, or 5) nucleotides from the nucleotide sequence of dsRNA agent 481; (c) the nucleotide sequence of the antisense strand differs by no more than 5 (e.g., 0, 1, 2, 3, 4, or 5) nucleotides from the nucleotide sequence of the antisense strand of dsRNA agent 482; and the nucleotide sequence of the sense strand differs by no more than 5 (e.g., 0, 1, 2, 3, 4, or 5) nucleotides from the nucleotide sequence of dsRNA agent 482; (d) the nucleotide sequence of the antisense strand differs by no more than 5 (e.g., 0, 1, 2, 3, 4, or 5) nucleotides from the nucleotide sequence of the antisense strand of dsRNA agent 480; and the nucleotide sequence of the sense strand differs by no more than 5 (e.g., 0, 1, 2, 3, 4, or 5) nucleotides from the nucleotide sequence of dsRNA agent 480; or (c) the nucleotide sequence of the antisense strand differs by no more than 5 (e.g., 0, 1, 2, 3, 4, or 5) nucleotides from the nucleotide sequence of the antisense strand of dsRNA agent 409; and the nucleotide sequence of the sense strand differs by no more than 5 (e.g., 0, 1, 2, 3, 4, or 5) nucleotides from the nucleotide sequence of dsRNA agent 409.

[0022] In some embodiments, (a) the nucleotide sequence of the antisense strand differs by no more than 3 (e.g., 0, 1, 2, or 3) nucleotides from the nucleotide sequence of the antisense strand of dsRNA agent 479; and the nucleotide sequence of the sense strand differs by no more than 3 (e.g., 0, 1, 2, or 3) nucleotides from the nucleotide sequence of dsRNA agent 479; (b) the nucleotide sequence of the antisense strand differs by no more than 3 (e.g., 0, 1, 2, or 3) nucleotides from the nucleotide sequence of the antisense strand of dsRNA agent 481; and the nucleotide sequence of the sense strand differs by no more than 3 (e.g., 0, 1, 2, or 3) nucleotides from the nucleotide sequence of dsRNA agent 481; (c) the nucleotide sequence of the antisense strand differs by no more than 3 (e.g., 0, 1, 2, or 3) nucleotides from the nucleotide sequence of the antisense strand of dsRNA agent 482; and the nucleotide sequence of the sense strand differs by no more than 3 (e.g., 0, 1, 2, or 3) nucleotides from the nucleotide sequence of dsRNA agent 482; (d) the nucleotide sequence of the antisense strand differs by no more than 3 (e.g., 0, 1, 2, or 3) nucleotides from the nucleotide sequence of the antisense strand of dsRNA agent 480; and the nucleotide sequence of the sense strand differs by no more than 3 (e.g., 0, 1, 2, or 3) nucleotides from the nucleotide sequence of dsRNA agent 480; or (c) the nucleotide sequence of the antisense strand differs by no more than 3 (e.g., 0, 1, 2, or 3) nucleotides from the nucleotide sequence of the antisense strand of dsRNA agent 409; and the nucleotide sequence of the sense strand differs by no more than 3 (e.g., 0, 1, 2, or 3) nucleotides from the nucleotide sequence of dsRNA agent 409.

[0023] In some embodiments, (a) the nucleotide sequence of the antisense strand comprises the nucleotide sequence of the antisense strand of dsRNA agent 479; and the nucleotide sequence of the sense strand comprises of the sense strand of dsRNA agent 479; (b) the nucleotide sequence of the antisense strand comprises the nucleotide sequence of the antisense strand of dsRNA agent 481; and the nucleotide sequence of the sense strand comprises of the sense strand of dsRNA agent 481; (c) the nucleotide sequence of the antisense strand comprises the nucleotide sequence of the antisense strand of dsRNA agent 482; and the nucleotide sequence of the sense strand comprises of the sense strand of dsRNA agent 482; (d) the nucleotide sequence of the antisense strand comprises the nucleotide sequence of the antisense strand of dsRNA agent 480; and the nucleotide sequence of the sense strand comprises of the sense strand of dsRNA agent 480; or (c) the nucleotide sequence of the antisense strand comprises the nucleotide sequence of the antisense strand of dsRNA agent 409; and the nucleotide sequence of the sense strand comprises of the sense strand of dsRNA agent 409.

[0024] In one aspect, provided herein are dsRNA agents for inhibiting expression of CIDEB (e.g., hCIDEB), wherein the dsRNA agent comprises a sense strand and an antisense strand forming a double stranded region, and wherein the sense strand comprises at least 15 (e.g., 16, 17, 18, 19, 20, 21) contiguous nucleotides of and differing by no more than 5 (e.g., 0, 1, 2, 3, 4, or 5 (e.g., 3 (e.g., 0, 1, 2, or 3))) nucleotides from nucleotides 50-90, 60-90, 68-106, 81-103, 138-190, 169-206, 232-254, 230-300, 280-312, 298-327, 444-498, 510-538, 521-558, 560-617, 692-778, 720-750, 740-780, 750-790, 760-780, 880-920, 890-940, 890-950, 920-970, 930-980, 961-1037, 1035-1060, 1105-1133, 1171-1213, 1216-1287, 1220-1270, 1230-1280, 1240-1290, 1250-1300, 1240-1270, 1240-1280, 1235-1270, 1245-1265, 1247-1267, 1252-1272, 1294-1346, 1366-1400, 1370-1410, 1360-1400, 1470-1510, 1410-1460, 1520-1560, 1580-1620, 1640-1680, 1640-1690, 1670-1710, 1700-1740, 1700-1745, 1724-1753, 1750-1790, 1757-1812, 1770-1810, 1833-1864, 1880-1920, 1900-1940, 1900-1927, 1915-1966, 1920-1970, 1930-1970, 1930-1965, 1940-1970, 1940-1965, 1937-1957, 1942-1962, 1938-1958, 1943-1963, 2010-2060, 2020-2060, 2030-2070, 2082-2110, 2080-2120, 2090-2130, 2130-2170, 2143-2198, 2197-2225, 2210-2250, 2215-2260, 2240-2280, 2250-2280, 2250-2290, or 2260-2290 of SEQ ID NO: 1; wherein the nucleotide sequence of the antisense strand comprises at least 15 (e.g., 16, 17, 18, 19, 20, 21, 22, or 23) contiguous nucleotides of and differing by no more than 5 (e.g., 0, 1, 2, 3, 4, or 5 (e.g., 2 or 3)) nucleotides from the nucleotide sequence of the corresponding complementary nucleotide sequence of SEQ ID NO: 2.

[0025] In some embodiments, the nucleotide sequence of the antisense strand differs by no more than 5 (e.g., 0, 1, 2, 3, 4, or 5 (e.g., 3 (e.g., 0, 1, 2, or 3))) nucleotides from the nucleotide sequence of any one of the antisense strands set forth in Table 2 or Table 3 or set forth in any one of SEQ ID NOS: 187-369, 602-657, 893-1131, or 1188-1191.

[0026] In some embodiments, the sense strand differs by no more than 3 (e.g., 0, 1, 2, or 3) nucleotides from the nucleotide sequence of any one of the sense strands set forth in Table 2 or Table 3 or set forth in any one of SEQ ID NOS: 4-186, 553-601, 658-892, or 1192.

[0027] In some embodiments, the sense strand comprises at least 15 (e.g., 16, 17, 18, 19, 20, 21) contiguous nucleotides of and differing by no more than 3 (e.g., 0, 1, 2, or 3) nucleotides from nucleotides 1220-1270, 1230-1280, 1240-1290, 1250-1300, 1240-1270, 1240-1280, 1235-1270, 1245-1265, 1247-1267, 1252-1272, 1915-1966, 1920-1970, 1930-1970, 1930-1965, 1940-1970, 1940-1965, 1937-1957, 1942-1962, 1938-1958, 1943-1963, of SEQ ID NO: 1.

[0028] In some embodiments, the sense strand comprises at least 15 (e.g., 16, 17, 18, 19, 20, 21) contiguous nucleotides of and differing by no more than 3 (e.g., 0, 1, 2, or 3) nucleotides from nucleotides 1220-1270, 1230-1280, 1240-1290, 1250-1300, 1240-1270, 1240-1280, 1235-1270, 1245-1265, 1247-1267, 1252-1272, and wherein the nucleotide sequence of the antisense strand comprises the nucleotide sequence set forth in any one of SEQ ID NOS: 315 or 321.

[0029] In some embodiments, the sense strand comprises at least 15 (e.g., 16, 17, 18, 19, 20, 21) contiguous nucleotides of and differing by no more than 3 (e.g., 0, 1, 2, or 3) nucleotides from nucleotides 1915-1966, 1920-1970, 1930-1970, 1930-1965, 1940-1970, 1940-1965, 1937-1957, 1942-1962, 1938-1958, 1943-1963, and wherein the nucleotide sequence of the antisense strand comprises the nucleotide sequence set forth in any one of SEQ ID NOS: 355 or 356.

[0030] In one aspect, provided herein are dsRNA agent for inhibiting expression of CIDEB (e.g., hCIDEB), wherein the dsRNA agent comprises a sense strand and an antisense strand forming a double stranded region, wherein the nucleotide sequence of the antisense strand comprises at least 15 (e.g., 16, 17, 18, 19, 20, 21, 22, or 23) contiguous nucleotides of and differing by no more than 5 (e.g., 0, 1, 2, 3, 4, or 5) nucleotides from the nucleotide sequence of any one of the antisense strands set forth in Table 2 or Table 3 or set forth in any one of SEQ ID NOS: 187-369, 602-657, 893-1131, or 1188-1191.

[0031] In some embodiments, the nucleotide sequence of the sense strand comprises at least 15 (e.g., 16, 17, 18, 19, 20, 21) contiguous nucleotides of and differing by no more than 5 (e.g., 0, 1, 2, 3, 4, or 5) nucleotides from the nucleotide sequence of the corresponding sense strand set forth in Table 2 or Table 3 or the corresponding sense strand set forth in one of SEQ ID NOS: 4-186, 553-601, 658-892, or 1192.

[0032] In some embodiments, the nucleotide sequence of the antisense strand comprises at least 15 (e.g., 16, 17, 18, 19, 20, 21, 22, or 23) contiguous nucleotides of and differing by no more than 3 (e.g., 0, 1, 2, or 3) nucleotides from the nucleotide sequence of any one of the antisense strands set forth in Table 2 or Table 3 or set forth in any one of SEQ ID NOS: 187-369, 602-657, 893-1131, or 1188-1191; and wherein the nucleotide sequence of the sense strand comprises at least 15 (e.g., 16, 17, 18, 19, 20, 21) contiguous nucleotides of and differing by no more than 3 (e.g., 0, 1, 2, or 3) nucleotides from the nucleotide sequence of the corresponding sense strand set forth in Table 2 or Table 3 or the corresponding sense strand set forth in one of SEQ ID NOS: 4-186, 553-601, 658-892, or 1192.

[0033] In some embodiments, the nucleotide sequence of the antisense strand comprises at least 21 (e.g., 21, 22, or 23) contiguous nucleotides of the nucleotide sequence of any one of the antisense strands set forth in Table 2 or Table 3 or set forth in any one of SEQ ID NOS: 187-369, 602-657, 893-1131, or 1188-1191; and wherein the nucleotide sequence of the sense strand comprises at least 18 (e.g., 18, 19, 20, 21) contiguous nucleotides of the nucleotide sequence of the corresponding sense strand set forth in Table 2 or Table 3 or the corresponding sense strand set forth in one of SEQ ID NOS: 4-186, 553-601, 658-892, or 1192.

[0034] In some embodiments, (a) the nucleotide sequence of the antisense strand comprises at least 15 (e.g., 16, 17, 18, 19, 20, 21, 22, or 23) contiguous nucleotides of and differing by no more than 5 (e.g., 0, 1, 2, 3, 4, or 5) nucleotides from the nucleotide sequence of set forth in SEQ ID NO: 355; and the nucleotide sequence of the sense strand comprises at least 15 (e.g., 16, 17, 18, 19, 20, 21) contiguous nucleotides of and differing by no more than 5 (e.g., 0, 1, 2, 3, 4, or 5) nucleotides from the nucleotide sequence set forth in SEQ ID NO: 172; (b) the nucleotide sequence of the antisense strand comprises at least 15 (e.g., 16, 17, 18, 19, 20, 21, 22, or 23) contiguous nucleotides of and differing by no more than 5 (e.g., 0, 1, 2, 3, 4, or 5) nucleotides from the nucleotide sequence of set forth in SEQ ID NO: 315; and the nucleotide sequence of the sense strand comprises at least 15 (e.g., 16, 17, 18, 19, 20, 21) contiguous nucleotides of and differing by no more than 5 (e.g., 0, 1, 2, 3, 4, or 5) nucleotides from the nucleotide sequence set forth in SEQ ID NO: 132; (c) the nucleotide sequence of the antisense strand comprises at least 15 (e.g., 16, 17, 18, 19, 20, 21, 22, or 23) contiguous nucleotides of and differing by no more than 5 (e.g., 0, 1, 2, 3, 4, or 5) nucleotides from the nucleotide sequence of set forth in SEQ ID NO: 356; and the nucleotide sequence of the sense strand comprises at least 15 (e.g., 16, 17, 18, 19, 20, 21) contiguous nucleotides of and differing by no more than 5 (e.g., 0, 1, 2, 3, 4, or 5) nucleotides from the nucleotide sequence set forth in SEQ ID NO: 173; or (d) the nucleotide sequence of the antisense strand comprises at least 15 (e.g., 16, 17, 18, 19, 20, 21, 22, or 23) contiguous nucleotides of and differing by no more than 5 (e.g., 0, 1, 2, 3, 4, or 5) nucleotides from the nucleotide sequence of set forth in SEQ ID NO: 321; and the nucleotide sequence of the sense strand comprises at least 15 (e.g., 16, 17, 18, 19, 20, 21) contiguous nucleotides of and differing by no more than 5 (e.g., 0, 1, 2, 3, 4, or 5) nucleotides from the nucleotide sequence set forth in SEQ ID NO: 138.

[0035] In some embodiments, (a) the nucleotide sequence of the antisense strand comprises at least 15 (e.g., 16, 17, 18, 19, 20, 21, 22, or 23) contiguous nucleotides of and differing by no more than 5 (e.g., 0, 1, 2, 3, 4, or 5) nucleotides from the nucleotide sequence of set forth in SEQ ID NO: 1191; and the nucleotide sequence of the sense strand comprises at least 15 (e.g., 16, 17, 18, 19, 20, 21) contiguous nucleotides of and differing by no more than 5 (e.g., 0, 1, 2, 3, 4, or 5) nucleotides from the nucleotide sequence set forth in SEQ ID NO: 1192; (b) the nucleotide sequence of the antisense strand comprises at least 15 (e.g., 16, 17, 18, 19, 20, 21, 22, or 23) contiguous nucleotides of and differing by no more than 5 (e.g., 0, 1, 2, 3, 4, or 5) nucleotides from the nucleotide sequence of set forth in SEQ ID NO: 1188; and the nucleotide sequence of the sense strand comprises at least 15 (e.g., 16, 17, 18, 19, 20, 21) contiguous nucleotides of and differing by no more than 5 (e.g., 0, 1, 2, 3, 4, or 5) nucleotides from the nucleotide sequence set forth in SEQ ID NO: 786; (c) the nucleotide sequence of the antisense strand comprises at least 15 (e.g., 16, 17, 18, 19, 20, 21, 22, or 23) contiguous nucleotides of and differing by no more than 5 (e.g., 0, 1, 2, 3, 4, or 5) nucleotides from the nucleotide sequence of set forth in SEQ ID NO: 1190; and the nucleotide sequence of the sense strand comprises at least 15 (e.g., 16, 17, 18, 19, 20, 21) contiguous nucleotides of and differing by no more than 5 (e.g., 0, 1, 2, 3, 4, or 5) nucleotides from the nucleotide sequence set forth in SEQ ID NO: 786; (d) the nucleotide sequence of the antisense strand comprises at least 15 (e.g., 16, 17, 18, 19, 20, 21, 22, or 23) contiguous nucleotides of and differing by no more than 5 (e.g., 0, 1, 2, 3, 4, or 5) nucleotides from the nucleotide sequence of set forth in SEQ ID NO: 1062; and the nucleotide sequence of the sense strand comprises at least 15 (e.g., 16, 17, 18, 19, 20, 21) contiguous nucleotides of and differing by no more than 5 (e.g., 0, 1, 2, 3, 4, or 5) nucleotides from the nucleotide sequence set forth in SEQ ID NO: 827; or (e) the nucleotide sequence of the antisense strand comprises at least 15 (e.g., 16, 17, 18, 19, 20, 21, 22, or 23) contiguous nucleotides of and differing by no more than 5 (e.g., 0, 1, 2, 3, 4, or 5) nucleotides from the nucleotide sequence of set forth in SEQ ID NO: 1189; and the nucleotide sequence of the sense strand comprises at least 15 (e.g., 16, 17, 18, 19, 20, 21) contiguous nucleotides of and differing by no more than 5 (e.g., 0, 1, 2, 3, 4, or 5) nucleotides from the nucleotide sequence set forth in SEQ ID NO: 792.

[0036] In one aspect, provided herein are dsRNA agent for inhibiting expression of CIDEB (e.g., hCIDEB), wherein the dsRNA agent comprises a sense strand and an antisense strand forming a double stranded region, wherein the nucleotide sequence of the antisense strand comprises at least 15 (e.g., 16, 17, 18, 19, 20, 21, 22, or 23) contiguous nucleotides of and differing by no more than 5 (e.g., 0, 1, 2, 3, 4, or 5) nucleotides from the nucleotide sequence of any one of the antisense strand of any one of dsRNA agents 129, 135, 169, 170, 409, 479, 480, 481, or 482.

[0037] In some embodiments, the nucleotide sequence of the sense strand comprises at least 15 (e.g., 16, 17, 18, 19, 20, 21) contiguous nucleotides of and differing by no more than 5 (e.g., 0, 1, 2, 3, 4, or 5) nucleotides from the nucleotide sequence of the corresponding sense strand of the dsRNA agent.

[0038] In some embodiments, the nucleotide sequence of the antisense strand comprises at least 15 (e.g., 16, 17, 18, 19, 20, 21, 22, or 23) contiguous nucleotides of and differing by no more than 3 (e.g., 0, 1, 2, or 3) nucleotides from the nucleotide sequence of any one of the antisense strand of any one of dsRNA agents 129, 135, 169, 170, 409, 479, 480, 481, or 482; and wherein the nucleotide sequence of the sense strand comprises at least 15 (e.g., 16, 17, 18, 19, 20, 21) contiguous nucleotides of and differing by no more than 3 (e.g., 0, 1, 2, or 3) nucleotides from the nucleotide sequence of the corresponding sense strand of the dsRNA agent.

[0039] In some embodiments, the nucleotide sequence of the antisense strand comprises at least 21 (e.g., 21, 22, or 23) contiguous nucleotides of the nucleotide sequence of any one of the antisense strands of any one of dsRNA agents 129, 135, 169, 170, 409, 479, 480, 481, or 482; and wherein the nucleotide sequence of the sense strand comprises at least 18 (e.g., 18, 19, 20, 21) contiguous nucleotides of the nucleotide sequence of the corresponding sense strand of the dsRNA agent.

[0040] In some embodiments, (a) the nucleotide sequence of the antisense strand comprises at least 15 (e.g., 16, 17, 18, 19, 20, 21, 22, or 23) contiguous nucleotides of and differing by no more than 5 (e.g., 0, 1, 2, 3, 4, or 5) nucleotides from the nucleotide sequence of the antisense strand of dsRNA agent 129; and the nucleotide sequence of the sense strand comprises at least 15 (e.g., 16, 17, 18, 19, 20, 21) contiguous nucleotides of and differing by no more than 5 (e.g., 0, 1, 2, 3, 4, or 5) nucleotides from the nucleotide sequence of the sense strand of dsRNA agent 129; (b) the nucleotide sequence of the antisense strand comprises at least 15 (e.g., 16, 17, 18, 19, 20, 21, 22, or 23) contiguous nucleotides of and differing by no more than 5 (e.g., 0, 1, 2, 3, 4, or 5) nucleotides from the nucleotide sequence of the antisense strand of dsRNA agent 135; and the nucleotide sequence of the sense strand comprises at least 15 (e.g., 16, 17, 18, 19, 20, 21) contiguous nucleotides of and differing by no more than 5 (e.g., 0, 1, 2, 3, 4, or 5) nucleotides from the nucleotide sequence of the sense strand of dsRNA agent 135; (c) the nucleotide sequence of the antisense strand comprises at least 15 (e.g., 16, 17, 18, 19, 20, 21, 22, or 23) contiguous nucleotides of and differing by no more than 5 (e.g., 0, 1, 2, 3, 4, or 5) nucleotides from the nucleotide sequence of the antisense strand of dsRNA agent 169; and the nucleotide sequence of the sense strand comprises at least 15 (e.g., 16, 17, 18, 19, 20, 21) contiguous nucleotides of and differing by no more than 5 (e.g., 0, 1, 2, 3, 4, or 5) nucleotides from the nucleotide sequence of the sense strand of dsRNA agent 169; or (d) the nucleotide sequence of the antisense strand comprises at least 15 (e.g., 16, 17, 18, 19, 20, 21, 22, or 23) contiguous nucleotides of and differing by no more than 5 (e.g., 0, 1, 2, 3, 4, or 5) nucleotides from the nucleotide sequence of the antisense strand of dsRNA agent 170; and the nucleotide sequence of the sense strand comprises at least 15 (e.g., 16, 17, 18, 19, 20, 21) contiguous nucleotides of and differing by no more than 5 (e.g., 0, 1, 2, 3, 4, or 5) nucleotides from the nucleotide sequence of the sense strand of dsRNA agent 170.

[0041] In some embodiments, (a) the nucleotide sequence of the antisense strand comprises at least 15 (e.g., 16, 17, 18, 19, 20, 21, 22, or 23) contiguous nucleotides of and differing by no more than 5 (e.g., 0, 1, 2, 3, 4, or 5) nucleotides from the nucleotide sequence of the antisense strand of dsRNA agent 409; and the nucleotide sequence of the sense strand comprises at least 15 (e.g., 16, 17, 18, 19, 20, 21) contiguous nucleotides of and differing by no more than 5 (e.g., 0, 1, 2, 3, 4, or 5) nucleotides from the nucleotide sequence of the sense strand of dsRNA agent 409; (b) the nucleotide sequence of the antisense strand comprises at least 15 (e.g., 16, 17, 18, 19, 20, 21, 22, or 23) contiguous nucleotides of and differing by no more than 5 (e.g., 0, 1, 2, 3, 4, or 5) nucleotides from the nucleotide sequence of the antisense strand of dsRNA agent 479; and the nucleotide sequence of the sense strand comprises at least 15 (e.g., 16, 17, 18, 19, 20, 21) contiguous nucleotides of and differing by no more than 5 (e.g., 0, 1, 2, 3, 4, or 5) nucleotides from the nucleotide sequence of the sense strand of dsRNA agent 479; (c) the nucleotide sequence of the antisense strand comprises at least 15 (e.g., 16, 17, 18, 19, 20, 21, 22, or 23) contiguous nucleotides of and differing by no more than 5 (e.g., 0, 1, 2, 3, 4, or 5) nucleotides from the nucleotide sequence of the antisense strand of dsRNA agent 480; and the nucleotide sequence of the sense strand comprises at least 15 (e.g., 16, 17, 18, 19, 20, 21) contiguous nucleotides of and differing by no more than 5 (e.g., 0, 1, 2, 3, 4, or 5) nucleotides from the nucleotide sequence of the sense strand of dsRNA agent 480; (d) the nucleotide sequence of the antisense strand comprises at least 15 (e.g., 16, 17, 18, 19, 20, 21, 22, or 23) contiguous nucleotides of and differing by no more than 5 (e.g., 0, 1, 2, 3, 4, or 5) nucleotides from the nucleotide sequence of the antisense strand of dsRNA agent 481; and the nucleotide sequence of the sense strand comprises at least 15 (e.g., 16, 17, 18, 19, 20, 21) contiguous nucleotides of and differing by no more than 5 (e.g., 0, 1, 2, 3, 4, or 5) nucleotides from the nucleotide sequence of the sense strand of dsRNA agent 481; or (c) the nucleotide sequence of the antisense strand comprises at least 15 (e.g., 16, 17, 18, 19, 20, 21, 22, or 23) contiguous nucleotides of and differing by no more than 5 (e.g., 0, 1, 2, 3, 4, or 5) nucleotides from the nucleotide sequence of the antisense strand of dsRNA agent 482; and the nucleotide sequence of the sense strand comprises at least 15 (e.g., 16, 17, 18, 19, 20, 21) contiguous nucleotides of and differing by no more than 5 (e.g., 0, 1, 2, 3, 4, or 5) nucleotides from the nucleotide sequence of the sense strand of dsRNA agent 482.

[0042] In one aspect, provided herein are dsRNA agents for inhibiting expression of CIDEB (e.g., hCIDEB), wherein the dsRNA agent comprises a sense strand and an antisense strand forming a double stranded region, and wherein (a) the nucleotide sequence of the antisense strand comprises the nucleotide sequence set forth in SEQ ID NO: 1191; and the nucleotide sequence of the sense strand comprises the nucleotide sequence set forth in SEQ ID NO: 1192; (b) the nucleotide sequence of the antisense strand comprises the nucleotide sequence set forth in SEQ ID NO: 1188; and the nucleotide sequence of the sense strand comprises the nucleotide sequence set forth in SEQ ID NO: 786; (c) the nucleotide sequence of the antisense strand comprises the nucleotide sequence set forth in SEQ ID NO: 1190; and the nucleotide sequence of the sense strand comprises the nucleotide sequence set forth in SEQ ID NO: 786; (d) the nucleotide sequence of the antisense strand comprises the nucleotide sequence set forth in SEQ ID NO: 1062; and the nucleotide sequence of the sense strand comprises the nucleotide sequence set forth in SEQ ID NO: 827; or (c) the nucleotide sequence of the antisense strand comprises the nucleotide sequence set forth in SEQ ID NO: 1189; and the nucleotide sequence of the sense strand comprises the nucleotide sequence set forth in SEQ ID NO: 792.

[0043] In one aspect, provided herein are dsRNA agents for inhibiting expression of CIDEB (e.g., hCIDEB), wherein the dsRNA agent comprises a sense strand and an antisense strand forming a double stranded region, and wherein (a) the nucleotide sequence of the antisense strand differs by no more than 5 (e.g., 0, 1, 2, 3, 4, or 5) nucleotides from the nucleotide sequence set forth in SEQ ID NO: 1191; and the nucleotide sequence of the sense strand differs by no more than 5 (e.g., 0, 1, 2, 3, 4, or 5) nucleotides from the nucleotide sequence set forth in SEQ ID NO: 1192; (b) the nucleotide sequence of the antisense strand differs by no more than 5 (e.g., 0, 1, 2, 3, 4, or 5) nucleotides from the nucleotide sequence set forth in SEQ ID NO: 1188; and the nucleotide sequence of the sense strand differs by no more than 5 (e.g., 0, 1, 2, 3, 4, or 5) nucleotides from the nucleotide sequence set forth in SEQ ID NO: 786; (c) the nucleotide sequence of the antisense strand differs by no more than 5 (e.g., 0, 1, 2, 3, 4, or 5) nucleotides from the nucleotide sequence set forth in SEQ ID NO: 1190; and the nucleotide sequence of the sense strand differs by no more than 5 (e.g., 0, 1, 2, 3, 4, or 5) nucleotides from the nucleotide sequence set forth in SEQ ID NO: 786; (d) the nucleotide sequence of the antisense strand differs by no more than 5 (e.g., 0, 1, 2, 3, 4, or 5) nucleotides from the nucleotide sequence set forth in SEQ ID NO: 1062; and the nucleotide sequence of the sense strand differs by no more than 5 (e.g., 0, 1, 2, 3, 4, or 5) nucleotides from the nucleotide sequence set forth in SEQ ID NO: 827; or (e) the nucleotide sequence of the antisense strand differs by no more than 5 (e.g., 0, 1, 2, 3, 4, or 5) nucleotides from the nucleotide sequence set forth in SEQ ID NO: 1189; and the nucleotide sequence of the sense strand differs by no more than 5 (e.g., 0, 1, 2, 3, 4, or 5) nucleotides from the nucleotide sequence set forth in SEQ ID NO: 792.

[0044] In one aspect, provided herein are dsRNA agents for inhibiting expression of CIDEB (e.g., hCIDEB), wherein the dsRNA agent comprises a sense strand and an antisense strand forming a double stranded region, and wherein (a) the nucleotide sequence of the antisense strand differs by no more than 3 (e.g., 0, 1, 2, or 3) nucleotides from the nucleotide sequence set forth in SEQ ID NO: 1191; and the nucleotide sequence of the sense strand differs by no more than 3 (e.g., 0, 1, 2, or 3) nucleotides from the nucleotide sequence set forth in SEQ ID NO: 1192; (b) the nucleotide sequence of the antisense strand differs by no more than 3 (e.g., 0, 1, 2, or 3) nucleotides from the nucleotide sequence set forth in SEQ ID NO: 1188; and the nucleotide sequence of the sense strand differs by no more than 3 (e.g., 0, 1, 2, or 3) nucleotides from the nucleotide sequence set forth in SEQ ID NO: 786; (c) the nucleotide sequence of the antisense strand differs by no more than 3 (e.g., 0, 1, 2, or 3) nucleotides from the nucleotide sequence set forth in SEQ ID NO: 1190; and the nucleotide sequence of the sense strand differs by no more than 3 (e.g., 0, 1, 2, or 3) nucleotides from the nucleotide sequence set forth in SEQ ID NO: 786; (d) the nucleotide sequence of the antisense strand differs by no more than 3 (e.g., 0, 1, 2, or 3) nucleotides from the nucleotide sequence set forth in SEQ ID NO: 1062; and the nucleotide sequence of the sense strand differs by no more than 3 (e.g., 0, 1, 2, or 3) nucleotides from the nucleotide sequence set forth in SEQ ID NO: 827; or (e) the nucleotide sequence of the antisense strand differs by no more than 3 (e.g., 0, 1, 2, or 3) nucleotides from the nucleotide sequence set forth in SEQ ID NO: 1189; and the nucleotide sequence of the sense strand differs by no more than 3 (e.g., 0, 1, 2, or 3) nucleotides from the nucleotide sequence set forth in SEQ ID NO: 792.

[0045] In one aspect, provided herein are dsRNA agents for inhibiting expression of CIDEB (e.g., hCIDEB), wherein the dsRNA agent comprises a sense strand and an antisense strand forming a double stranded region, and wherein (a) the nucleotide sequence of the antisense strand differs by no more than 5 (e.g., 0, 1, 2, 3, 4, or 5) nucleotides from the nucleotide sequence set forth in SEQ ID NO: 355; and the nucleotide sequence of the sense strand differs by no more than 5 (e.g., 0, 1, 2, 3, 4, or 5) nucleotides from the nucleotide sequence set forth in SEQ ID NO: 172; (b) the nucleotide sequence of the antisense strand differs by no more than 5 (e.g., 0, 1, 2, 3, 4, or 5) nucleotides from the nucleotide sequence set forth in SEQ ID NO: 315; and the nucleotide sequence of the sense strand differs by no more than 5 (e.g., 0, 1, 2, 3, 4, or 5) nucleotides from the nucleotide sequence set forth in SEQ ID NO: 132; (c) the nucleotide sequence of the antisense strand differs by no more than 5 (e.g., 0, 1, 2, 3, 4, or 5) nucleotides from the nucleotide sequence set forth in SEQ ID NO: 356; and the nucleotide sequence of the sense strand differs by no more than 5 (e.g., 0, 1, 2, 3, 4, or 5) nucleotides from the nucleotide sequence set forth in SEQ ID NO: 173; or (d) the nucleotide sequence of the antisense strand differs by no more than 5 (e.g., 0, 1, 2, 3, 4, or 5) nucleotides from the nucleotide sequence set forth in SEQ ID NO: 321; and the nucleotide sequence of the sense strand differs by no more than 5 (e.g., 0, 1, 2, 3, 4, or 5) nucleotides from the nucleotide sequence set forth in SEQ ID NO: 138.

[0046] In one aspect, provided herein are dsRNA agents for inhibiting expression of CIDEB (e.g., hCIDEB), wherein the dsRNA agent comprises a sense strand and an antisense strand forming a double stranded region, and wherein (a) the nucleotide sequence of the antisense strand differs by no more than 3 (e.g., 0, 1, 2, or 3) nucleotides from the nucleotide sequence set forth in SEQ ID NO: 355; and the nucleotide sequence of the sense strand differs by no more than 3 (e.g., 0, 1, 2, or 3) nucleotides from the nucleotide sequence set forth in SEQ ID NO: 172; (b) the nucleotide sequence of the antisense strand differs by no more than 3 (e.g., 0, 1, 2, or 3) nucleotides from the nucleotide sequence set forth in SEQ ID NO: 315; and the nucleotide sequence of the sense strand differs by no more than 3 (e.g., 0, 1, 2, or 3) nucleotides from the nucleotide sequence set forth in SEQ ID NO: 132; (c) the nucleotide sequence of the antisense strand differs by no more than 3 (e.g., 0, 1, 2, or 3) nucleotides from the nucleotide sequence set forth in SEQ ID NO: 356; and the nucleotide sequence of the sense strand differs by no more than 3 (e.g., 0, 1, 2, or 3) nucleotides from the nucleotide sequence set forth in SEQ ID NO: 173; or (d) the nucleotide sequence of the antisense strand differs by no more than 3 (e.g., 0, 1, 2, or 3) nucleotides from the nucleotide sequence set forth in SEQ ID NO: 321; and the nucleotide sequence of the sense strand differs by no more than 3 (e.g., 0, 1, 2, or 3) nucleotides from the nucleotide sequence set forth in SEQ ID NO: 138.

[0047] In one aspect, provided herein are dsRNA agents for inhibiting expression of CIDEB (e.g., hCIDEB), wherein the dsRNA agent comprises a sense strand and an antisense strand forming a double stranded region, and wherein (a) the nucleotide sequence of the antisense strand comprises the nucleotide sequence set forth in SEQ ID NO: 355; and the nucleotide sequence of the sense strand comprises the nucleotide sequence set forth in SEQ ID NO: 172; (b) the nucleotide sequence of the antisense strand comprises the nucleotide sequence set forth in SEQ ID NO: 315; and the nucleotide sequence of the sense strand comprises the nucleotide sequence set forth in SEQ ID NO: 132; (c) the nucleotide sequence of the antisense strand comprises the nucleotide sequence set forth in SEQ ID NO: 356; and the nucleotide sequence of the sense strand comprises the nucleotide sequence set forth in SEQ ID NO: 173; or (d) the nucleotide sequence of the antisense strand comprises the nucleotide sequence set forth in SEQ ID NO: 321; and the nucleotide sequence of the sense strand comprises the nucleotide sequence set forth in SEQ ID NO: 138.

[0048] For the sake of clarity, it is noted that the following embodiments are applicable to any of the foregoing aspects as if individually recited directly following each aspect.

[0049] In some embodiments, the sense strand comprises at least one modified nucleotide and/or the antisense strand comprises at least one modified nucleotide. In some embodiments, at least 25%, 30%, 35%, 40%, 45%, 50%, 55%, 60%, 65%, 70%, 75%, 80%, 85%, 90%, 95%, or 100% of the nucleotides of the sense strand and/or antisense strand are modified. In some embodiments, all of the nucleotides in the sense strand and/or antisense strand are modified. In some embodiments, all of the nucleotides in the sense strand and the antisense strand are modified.

[0050] In some embodiments, at least one of the modified nucleotides comprises a modified sugar (e.g., ribose moiety).

[0051] In some embodiments, (a) the sense strand comprises at least one 2′-O-methyl and/or the antisense strand comprises at least one 2′-O-methyl and/or (b) the sense strand comprises at least one 2′-deoxy-2′-fluoro and/or the antisense strand comprises at least one 2′-deoxy-2′-fluoro.

[0052] In some embodiments, (a) the sense strand comprises at least one 2′-O-methyl and at least one 2′-deoxy-2′-fluoro; and the antisense strand comprises at least one 2′-O-methyl and at least one 2′-deoxy-2′-fluoro.

[0053] In some embodiments, at least one of the modified nucleotides comprises a modified nucleobase.

[0054] In some embodiments, the sense strand comprises at least one vinyl-phosphonate and/or the antisense strand comprises at least one vinyl-phosphonate. In some embodiments, the antisense strand comprises a 5′ vinyl-phosphonate. In some embodiments, the sense strand comprises at least one vinyl-phosphonate-2′-O-methyl (e.g., vinyl-phosphonate-2′-O-methyluridine) and/or the antisense strand comprises at least one vinyl-phosphonate-2′-O-methyl (e.g., vinyl-phosphonate-2′-O-methyluridine) (e.g., wherein the antisense strand comprises at least one vinyl-phosphonate-2′-O-methyl (e.g., vinyl-phosphonate-2′-O-methyluridine). In some embodiments, the antisense strand comprises a 5′ vinyl-phosphonate-2′-O-methyl (e.g., vinyl-phosphonate-2′-O-methyluridine).

[0055] In some embodiments, the sense strand comprises at least one modified internucleoside linkage and/or the antisense strand comprises at least one modified internucleoside linkage.

[0056] In some embodiments, the sense strand comprises at least one phosphorothioate and/or the antisense strand comprises at least one phosphorothioate.

[0057] In some embodiments, the sense strand comprises at least one phosphorothioate and the antisense strand comprises at least one phosphorothioate.

[0058] In some embodiments, each of the antisense strand and the sense strand are not more than 30, 29, 28, 27, 26, 25, 24, 23, 22, 21, 20, 19, 18, 17, 16, or 15 nucleotides in length. In some embodiments, the antisense strand comprises from about 15-30, 16-30, 17-30, 18-30, 19-30 20-30, 21-30, 22-30, 23-30, 24-30, 25-30, 36-30, 27-30, 28-30-, 29-30, 19-20, 19-21, 19-22, 19-23, 19-24, or 19-25 nucleotides; and/or the sense strand comprises from about 15-30, 16-30, 17-30, 18-30, 19-30 20-30, 21-30, 22-30, 23-30, 24-30, 25-30, 36-30, 27-30, 28-30-, 29-30, 19-20, 19-21, 19-22, 19-23, 19-24, or 19-25 nucleotides. In some embodiments, antisense strand comprises from about 19-23 nucleotides; and/or the sense strand comprises from about 19-23 nucleotides. In some embodiments, antisense strand comprises or consists of about 23 nucleotides; and/or the sense strand comprises or consists of about 21 nucleotides.

[0059] In some embodiments, the sense strand and/or the antisense strand comprises a 3′ and/or 5′ overhang of 1, 2, or 3 nucleotides. In some embodiments, the antisense strand comprises a 3′ overhang of 1, 2, or 3 nucleotides (e.g., 2 nucleotides). In some embodiments, the antisense strand comprises a 3′ overhang of 2 nucleotides.

[0060] In some embodiments, the double stranded region is from about 19-30, 19-29, 19-28, 19-27, 19-26, 19-25, 19-24, 19-23, 19-22, 19-20, 19-21, 23-30, 23-29, 23-28, 23-27, 23-26, 23-25, 23-24, 21-30, 21-29, 21-28, 21-27, 21-26, 21-25, 21-24, 21-23, or 21-22 nucleotide pairs in length. In some embodiments, the double stranded region is from about 19-23 or 19-21 nucleotide pairs in length. In some embodiments, the double stranded region is about 21 nucleotide pairs in length.

[0061] In some embodiments, the sense strand and the antisense strand are part of a single nucleic acid molecule (e.g., wherein a hairpin loop is between the sense strand and the antisense strand of the single nucleic acid molecule.

[0062] In some embodiments, the sense strand and the antisense strand are separate nucleic acid molecules (i.e., connected only through the double stranded region).

[0063] In some embodiments, the nucleotide sequence of the antisense strand consists of 23 nucleotides; the nucleotide sequence of the sense strand consists of 21 nucleotides; the double stranded region is 21 nucleotide pairs in length; the antisense strand comprises a 3′ overhang of 2 nucleotides; the antisense strand comprises a 5′ vinyl-phosphonate-2′-O-methyl (e.g., vinyl-phosphonate-2′-O-methyluridine), at least one 2′-O-methyl, at least one 2′-deoxy-2′-fluoro and at least one phosphorothioate; and the sense strand comprises at least one 2′-O-methyl, at least one 2′-deoxy-2′-fluoro and at least one phosphorothioate.

[0064] In one aspect, provided herein are conjugates comprising a dsRNA agent described herein and a heterologous moiety.

[0065] In some embodiments, the heterologous moiety is a peptide, protein, carbohydrate, lipid, polymer, or small molecule.

[0066] In some embodiments, the heterologous moiety is carbohydrate. In some embodiments, the heterologous moiety comprises one or more GalNac. In some embodiments, the GalNac is triantennary GalNac.

[0067] In some embodiments, the heterologous moiety is a targeting moiety. In some embodiments, the targeting moiety specifically binds to a moiety expressed by hepatocytes (e.g., on the surface of the hepatocytes). In some embodiments, the targeting moiety comprises GalNac. In some embodiments, the GalNac is triantennary GalNac. In some embodiments, the targeting moiety directs the agent to hepatocytes through specific binding to the asialoglycoprotein receptor (e.g., expressed on the surface of hepatocytes).

[0068] In some embodiments, the heterologous moiety is attached to the dsRNA agent via a linker.

[0069] In some embodiments, the linker comprises triethylene glycol (TEG). In some embodiments, the heterologous moiety comprises GalNac and the linker is TEG. In some embodiments, the heterologous moiety comprises triantennary GalNac and the linker is TEG.

[0070] In some embodiments, the heterologous moiety and linker comprises Formula XXXIX below:

[chemical structure]

[0071] In some embodiments, the heterologous moiety attached to the 3′ end of the sense and/or antisense strand and/or the 5′ end of the sense and/or antisense strand, and/or at an internal site of the sense and/or antisense strand. In some embodiments, the heterologous moiety attached to the 3′ end of the sense strand.

[0072] In some embodiments, the conjugate is set forth in Table 11.

[0073] In some embodiments, (a) the nucleotide sequence of the antisense strand differs by no more than 5 (e.g., 0, 1, 2, 3, 4, or 5) nucleotides from the nucleotide sequence set forth in SEQ ID NO: 1188; and the nucleotide sequence of the sense strand differs by no more than 5 (e.g., 0, 1, 2, 3, 4, or 5) nucleotides from the nucleotide sequence set forth in SEQ ID NO: 1193; (b) the nucleotide sequence of the antisense strand differs by no more than 5 (e.g., 0, 1, 2, 3, 4, or 5) nucleotides from the nucleotide sequence set forth in SEQ ID NO: 1190; and the nucleotide sequence of the sense strand differs by no more than 5 (e.g., 0, 1, 2, 3, 4, or 5) nucleotides from the nucleotide sequence set forth in SEQ ID NO: 1193; (c) the nucleotide sequence of the antisense strand differs by no more than 5 (e.g., 0, 1, 2, 3, 4, or 5) nucleotides from the nucleotide sequence set forth in SEQ ID NO: 1191; and the nucleotide sequence of the sense strand differs by no more than 5 (e.g., 0, 1, 2, 3, 4, or 5) nucleotides from the nucleotide sequence set forth in SEQ ID NO: 1194; (d) the nucleotide sequence of the antisense strand differs by no more than 5 (e.g., 0, 1, 2, 3, 4, or 5) nucleotides from the nucleotide sequence set forth in SEQ ID NO: 1189; and the nucleotide sequence of the sense strand differs by no more than 5 (e.g., 0, 1, 2, 3, 4, or 5) nucleotides from the nucleotide sequence set forth in SEQ ID NO: 1195; or (e) the nucleotide sequence of the antisense strand differs by no more than 5 (e.g., 0, 1, 2, 3, 4, or 5) nucleotides from the nucleotide sequence set forth in SEQ ID NO: 1062; and the nucleotide sequence of the sense strand differs by no more than 5 (e.g., 0, 1, 2, 3, 4, or 5) nucleotides from the nucleotide sequence set forth in SEQ ID NO: 1196.

[0074] In some embodiments, (a) the nucleotide sequence of the antisense strand differs by no more than 3 (e.g., 0, 1, 2, or 3) nucleotides from the nucleotide sequence set forth in SEQ ID NO: 1188; and the nucleotide sequence of the sense strand differs by no more than 3 (e.g., 0, 1, 2, or 3) nucleotides from the nucleotide sequence set forth in SEQ ID NO: 1193; (b) the nucleotide sequence of the antisense strand differs by no more than 3 (e.g., 0, 1, 2, or 3) nucleotides from the nucleotide sequence set forth in SEQ ID NO: 1190; and the nucleotide sequence of the sense strand differs by no more than 3 (e.g., 0, 1, 2, or 3) nucleotides from the nucleotide sequence set forth in SEQ ID NO: 1193; (c) the nucleotide sequence of the antisense strand differs by no more than 3 (e.g., 0, 1, 2, or 3) nucleotides from the nucleotide sequence set forth in SEQ ID NO: 1191; and the nucleotide sequence of the sense strand differs by no more than 3 (e.g., 0, 1, 2, or 3) nucleotides from the nucleotide sequence set forth in SEQ ID NO: 1194; (d) the nucleotide sequence of the antisense strand differs by no more than 3 (e.g., 0, 1, 2, or 3) nucleotides from the nucleotide sequence set forth in SEQ ID NO: 1189; and the nucleotide sequence of the sense strand differs by no more than 3 (e.g., 0, 1, 2, or 3) nucleotides from the nucleotide sequence set forth in SEQ ID NO: 1195; or (c) the nucleotide sequence of the antisense strand differs by no more than 3 (e.g., 0, 1, 2, or 3) nucleotides from the nucleotide sequence set forth in SEQ ID NO: 1062; and the nucleotide sequence of the sense strand differs by no more than 3 (e.g., 0, 1, 2, or 3) nucleotides from the nucleotide sequence set forth in SEQ ID NO: 1196.

[0075] In some embodiments, (a) the nucleotide sequence of the antisense strand comprises the nucleotide sequence set forth in SEQ ID NO: 1188; and the nucleotide sequence of the sense strand comprises the nucleotide sequence set forth in SEQ ID NO: 1193; (b) the nucleotide sequence of the antisense strand comprises the nucleotide sequence set forth in SEQ ID NO: 1190; and the nucleotide sequence of the sense strand comprises the nucleotide sequence set forth in SEQ ID NO: 1193; (c) the nucleotide sequence of the antisense strand comprises the nucleotide sequence set forth in SEQ ID NO: 1191; and the nucleotide sequence of the sense strand comprises the nucleotide sequence set forth in SEQ ID NO: 1194; (d) the nucleotide sequence of the antisense strand comprises the nucleotide sequence set forth in SEQ ID NO: 1189; and the nucleotide sequence of the sense strand comprises the nucleotide sequence set forth in SEQ ID NO: 1195; or (c) the nucleotide sequence of the antisense strand comprises the nucleotide sequence set forth in SEQ ID NO: 1062; and the nucleotide sequence of the sense strand comprises the nucleotide sequence set forth in SEQ ID NO: 1196.

[0076] In some embodiments, the conjugate comprises any one of dsRNA agents 483-487.

[0077] In some embodiments, (a) the nucleotide sequence of the antisense strand differs by no more than 5 (e.g., 0, 1, 2, 3, 4, or 5) nucleotides from the nucleotide sequence of the antisense strand of dsRNA agent 483; and the nucleotide sequence of the sense strand differs by no more than 5 (e.g., 0, 1, 2, 3, 4, or 5) nucleotides from the nucleotide sequence of dsRNA agent 483; (b) the nucleotide sequence of the antisense strand differs by no more than 5 (e.g., 0, 1, 2, 3, 4, or 5) nucleotides from the nucleotide sequence of the antisense strand of dsRNA agent 484; and the nucleotide sequence of the sense strand differs by no more than 5 (e.g., 0, 1, 2, 3, 4, or 5) nucleotides from the nucleotide sequence of dsRNA agent 484; (c) the nucleotide sequence of the antisense strand differs by no more than 5 (e.g., 0, 1, 2, 3, 4, or 5) nucleotides from the nucleotide sequence of the antisense strand of dsRNA agent 485; and the nucleotide sequence of the sense strand differs by no more than 5 (e.g., 0, 1, 2, 3, 4, or 5) nucleotides from the nucleotide sequence of dsRNA agent 485; (d) the nucleotide sequence of the antisense strand differs by no more than 5 (e.g., 0, 1, 2, 3, 4, or 5) nucleotides from the nucleotide sequence of the antisense strand of dsRNA agent 486; and the nucleotide sequence of the sense strand differs by no more than 5 (e.g., 0, 1, 2, 3, 4, or 5) nucleotides from the nucleotide sequence of dsRNA agent 486; or (e) the nucleotide sequence of the antisense strand differs by no more than 5 (e.g., 0, 1, 2, 3, 4, or 5) nucleotides from the nucleotide sequence of the antisense strand of dsRNA agent 487; and the nucleotide sequence of the sense strand differs by no more than 5 (e.g., 0, 1, 2, 3, 4, or 5) nucleotides from the nucleotide sequence of dsRNA agent 487.

[0078] In some embodiments, (a) the nucleotide sequence of the antisense strand differs by no more than 3 (e.g., 0, 1, 2, or 3) nucleotides from the nucleotide sequence of the antisense strand of dsRNA agent 483; and the nucleotide sequence of the sense strand differs by no more than 3 (e.g., 0, 1, 2, or 3) nucleotides from the nucleotide sequence of dsRNA agent 483; (b) the nucleotide sequence of the antisense strand differs by no more than 3 (e.g., 0, 1, 2, or 3) nucleotides from the nucleotide sequence of the antisense strand of dsRNA agent 484; and the nucleotide sequence of the sense strand differs by no more than 3 (e.g., 0, 1, 2, or 3) nucleotides from the nucleotide sequence of dsRNA agent 484; (c) the nucleotide sequence of the antisense strand differs by no more than 3 (e.g., 0, 1, 2, or 3) nucleotides from the nucleotide sequence of the antisense strand of dsRNA agent 485; and the nucleotide sequence of the sense strand differs by no more than 3 (e.g., 0, 1, 2, or 3) nucleotides from the nucleotide sequence of dsRNA agent 485; (d) the nucleotide sequence of the antisense strand differs by no more than 3 (e.g., 0, 1, 2, or 3) nucleotides from the nucleotide sequence of the antisense strand of dsRNA agent 486; and the nucleotide sequence of the sense strand differs by no more than 3 (e.g., 0, 1, 2, or 3) nucleotides from the nucleotide sequence of dsRNA agent 486; or (e) the nucleotide sequence of the antisense strand differs by no more than 3 (e.g., 0, 1, 2, or 3) nucleotides from the nucleotide sequence of the antisense strand of dsRNA agent 487; and the nucleotide sequence of the sense strand differs by no more than 3 (e.g., 0, 1, 2, or 3) nucleotides from the nucleotide sequence of dsRNA agent 487.

[0079] In some embodiments, (a) the nucleotide sequence of the antisense strand comprises the nucleotide sequence of the antisense strand of dsRNA agent 483; and the nucleotide sequence of the sense strand comprises of the sense strand of dsRNA agent 483; (b) the nucleotide sequence of the antisense strand comprises the nucleotide sequence of the antisense strand of dsRNA agent 484; and the nucleotide sequence of the sense strand comprises of the sense strand of dsRNA agent 484; (c) the nucleotide sequence of the antisense strand comprises the nucleotide sequence of the antisense strand of dsRNA agent 485; and the nucleotide sequence of the sense strand comprises of the sense strand of dsRNA agent 485; (d) the nucleotide sequence of the antisense strand comprises the nucleotide sequence of the antisense strand of dsRNA agent 486; and the nucleotide sequence of the sense strand comprises of the sense strand of dsRNA agent 486; or (c) the nucleotide sequence of the antisense strand comprises the nucleotide sequence of the antisense strand of dsRNA agent 487; and the nucleotide sequence of the sense strand comprises of the sense strand of dsRNA agent 487.

[0080] In one aspect, provided herein are vectors (e.g., a viral vector, a non-viral vector) encoding an antisense strand described herein, a sense strand described herein, or both an antisense described herein and a sense strand described herein.

[0081] In one aspect, provided herein are carriers comprising a dsRNA agent described herein, a conjugate described herein, or a vector described herein.

[0082] In some embodiments, the carrier comprises a nanoparticle, a polymer, a lipid-based delivery system, as dendrimer, a cationic delivery system, or a hydrogel. In some embodiments the lipid-based delivery system is a lipid nanoparticle (LNP), liposome, lipoplex, nanoliposome, an exosome, or a micelle.

[0083] In one aspect, provided herein are cells (or population of cells) comprising a dsRNA agent described herein, a conjugate described herein, a vector described herein, or a carrier described herein.

[0084] In one aspect, provided herein are pharmaceutical compositions comprising a dsRNA agent described herein, a conjugate described herein, a vector described herein, a carrier described herein, or a cell (or population of cells) described herein, and a pharmaceutically acceptable excipient.

[0085] In one aspect, provided herein are kits comprising a dsRNA agent described herein, a conjugate described herein, a vector described herein, a carrier described herein, a cell (or population of cells) described herein, or a pharmaceutical composition described herein.

[0086] In one aspect, provided herein are methods of delivering a dsRNA, conjugate, vector, carrier, or pharmaceutical composition to a cell, the method comprising introducing into a cell a dsRNA agent described herein, a conjugate described herein, a vector described herein, a carrier described herein, a cell (or population of cells) described herein, or a pharmaceutical composition described herein, to thereby deliver the dsRNA, conjugate, vector, carrier, or pharmaceutical composition into the cell. In some embodiments, the cell is in vitro, ex vivo, or in vivo. In some embodiments the cell is a subject (e.g., a human subject).

[0087] In one aspect, provided herein are methods of delivering a dsRNA, conjugate, vector, carrier, cell, or pharmaceutical composition to a subject, the method comprising administering to the subject a dsRNA agent described herein, a conjugate described herein, a vector described herein, a carrier described herein, a cell (or population of cells) described herein, or a pharmaceutical composition described herein, to thereby deliver the dsRNA, conjugate, vector, carrier, cell, or pharmaceutical composition to the subject.

[0088] In one aspect, provided herein are methods of reducing or inhibiting expression of CIDEB (e.g., hCIDEB) in a cell, the method comprising delivering into the cell a dsRNA agent described herein, a conjugate described herein, a vector described herein, a carrier described herein, a cell (or population of cells) described herein, or a pharmaceutical composition described herein, to thereby reduce or inhibit expression of CIDEB (e.g., hCIDEB) in the cell.

[0089] In one aspect, provided herein are methods of reducing or inhibiting expression of CIDEB (e.g., hCIDEB) in a cell in a subject, the method comprising administering to the subject a dsRNA agent described herein, a conjugate described herein, a vector described herein, a carrier described herein, a cell (or population of cells) described herein, or a pharmaceutical composition described herein, to thereby reduce or inhibit expression of CIDEB (e.g., hCIDEB) in the cell in the subject.

[0090] In one aspect, provided herein are methods of treating, ameliorating, or preventing a CIDEB (e.g., hCIDEB) associated disease in a subject, the method comprising administering to the subject a dsRNA agent described herein, a conjugate described herein, a vector described herein, a carrier described herein, a cell (or population of cells) described herein, or a pharmaceutical composition described herein, to thereby treat, ameliorate, or prevent the CIDEB (e.g., hCIDEB) associated disease in the subject.

[0091] In some embodiments, the treating, ameliorating, or preventing of the CIDEB (e.g., hCIDEB) associated disease is mediated (at least in part) through the by reducing or inhibiting expression of CIDEB (e.g., hCIDEB) in the subject (e.g., a population of cells within the subject).

[0092] In some embodiments, the CIDEB (e.g., hCIDEB) associated disease is fatty liver disease, steatotic liver disease, liver inflammation, NASH, NAFLD, MASLD, MASH, MAFLD, MetALD, SLD, or cryptogenic SLD.

[0093] In some embodiments, the CIDEB (e.g., hCIDEB) associated disease is liver fibrosis, cirrhosis, liver failure, jaundice, AFLD, obesity-induced metabolic syndrome, insulin insensitivity, or type-2 diabetes.

[0094] In one aspect, provided herein are methods of treating, ameliorate, or preventing a liver disease in a subject, the method comprising administering to the subject a dsRNA agent described herein, a conjugate described herein, a vector described herein, a carrier described herein, a cell (or population of cells) described herein, or a pharmaceutical composition described herein, to thereby treat, ameliorate, or prevent the liver disease in the subject.

[0095] In some embodiments, the treating, ameliorating, or preventing of the liver disease is mediated (at least in part) through the by reducing or inhibiting expression of CIDEB (e.g., hCIDEB) in the subject (e.g., a population of cells within the subject).

[0096] In some embodiments, the liver disease is fatty liver disease, steatotic liver disease, liver inflammation, NASH, NAFLD, MASLD, MASH, MAFLD, MetALD, SLD, or cryptogenic SLD. In some embodiments, the liver disease is liver fibrosis, cirrhosis, liver failure, jaundice, AFLD, obesity-induced metabolic syndrome, insulin insensitivity, or type-2 diabetes.

[0097] In one aspect, provided herein are methods of diagnosing a CIDEB (e.g., hCIDEB) associated disease in a subject, the method comprising (a) isolating and purifying DNA, RNA, or protein, or having DNA, RNA, or protein isolated and purified, from a sample obtained from the subject; (b) detecting, or having detected, the presence or absence of one or more somatic CIDEB mutation in the DNA, RNA, or protein, wherein the presence of the one or more somatic mutation indicates that the subject has a CIDEB (e.g., hCIDEB) associated disease.

[0098] In some embodiments, the CIDEB (e.g., hCIDEB) associated disease is a liver disease. In some embodiments, the CIDEB (e.g., hCIDEB) associated disease is fatty liver disease, steatotic liver disease, liver inflammation, NASH, NAFLD, MASLD, MASH, MAFLD, MetALD, SLD, or cryptogenic SLD. In some embodiments, the CIDEB (e.g., hCIDEB) associated disease is liver fibrosis, cirrhosis, liver failure, jaundice, AFLD, obesity-induced metabolic syndrome, insulin insensitivity, or type-2 diabetes.

[0099] In one aspect, provided herein are methods of diagnosing a liver disease in a subject, the method comprising (a) isolating and purifying DNA, RNA, or protein, or having DNA, RNA, or protein isolated and purified, from a sample obtained from the subject; (b) detecting, or having detected, the presence or absence of one or more somatic CIDEB mutation in the DNA, RNA, or protein, wherein the presence of the one or more somatic mutation indicates that the subject has a liver disease.

[0100] In some embodiments, the liver disease is fatty liver disease, steatotic liver disease, liver inflammation, NASH, NAFLD, MASLD, MASH, MAFLD, MetALD, SLD, or cryptogenic SLD. In some embodiments, the liver disease is liver fibrosis, cirrhosis, liver failure, jaundice, AFLD, obesity-induced metabolic syndrome, insulin insensitivity, or type-2 diabetes.

[0101] In some embodiments, (a) comprises isolating and purifying DNA, or having DNA isolated and purified, from a sample obtained from the subject; and (b) comprises detecting, or having detected, the presence or absence of the one or more somatic CIDEB mutation in the DNA.

[0102] In some embodiments, the method further comprises administering to the subject an inhibitory nucleic acid molecule that inhibits expression of CIDEB if a CIDEB somatic mutation is detected in the DNA, RNA, or protein. In some embodiments, the inhibitory nucleic acid molecule comprises a dsRNA agent described herein, a conjugate described herein, a vector described herein, a carrier described herein, a cell (or population of cells) described herein, or a pharmaceutical composition described herein.

[0103] In one aspect, provided herein are methods of selecting a subject for administration of an inhibitory nucleic acid molecule that inhibits expression of CIDEB, the method comprising (a) isolating and purifying DNA, RNA, or protein, or having DNA, RNA, or protein isolated and purified, from a sample obtained from the subject; (b) detecting, or having detected, the presence or absence of one or more somatic CIDEB mutation in the DNA, RNA, or protein, wherein the subject is selected for administration of the inhibitory nucleic acid molecule if the one or more somatic mutation is present.

[0104] In some embodiments, (a) comprises isolating and purifying DNA, or having DNA isolated and purified, from a sample obtained from the subject; and (b) comprises detecting, or having detected, the presence or absence of the one or more somatic CIDEB mutation in the DNA.

[0105] In some embodiments, the method further comprises administering to the subject the inhibitory nucleic acid molecule if the subject is selected.

[0106] In some embodiments, the inhibitory nucleic acid molecule comprises a dsRNA agent described herein, a conjugate described herein, a vector described herein, a carrier described herein, a cell (or population of cells) described herein, or a pharmaceutical composition described herein.

[0107] In one aspect, provided herein are methods of treating, ameliorating, or preventing a CIDEB (e.g., hCIDEB) associated disease in a subject, the method comprising (a) isolating and purifying DNA, RNA, or protein, or having DNA, RNA, or protein isolated and purified, from a sample obtained from the subject; (b) detecting, or having detected, the presence or absence of one or more somatic CIDEB mutation in the DNA, RNA, or protein, and (c) administering to the subject an inhibitory nucleic acid that inhibits expression of CIDEB if the one or more CIDEB somatic mutation is detected in the DNA, RNA, or protein.

[0108] In some embodiments, the CIDEB (e.g., hCIDEB) associated disease is a liver disease. In some embodiments, the liver disease is fatty liver disease, steatotic liver disease, liver inflammation, NASH, NAFLD, MASLD, MASH, MAFLD, MetALD, SLD, or cryptogenic SLD.

[0109] In some embodiments, the liver disease is liver fibrosis, cirrhosis, liver failure, jaundice, AFLD, obesity-induced metabolic syndrome, insulin insensitivity, or type-2 diabetes.

[0110] In some embodiments, the treating, ameliorating, or preventing of the CIDEB (e.g., hCIDEB) associated disease is mediated (at least in part) through the by reducing or inhibiting expression of CIDEB (e.g., hCIDEB) in the subject (e.g., a population of cells within the subject).

[0111] In one aspect, provided herein are methods of treating, ameliorating, or preventing a liver disease in a subject, the method comprising (a) isolating and purifying DNA, RNA, or protein, or having DNA, RNA, or protein isolated and purified, from a sample obtained from the subject; (b) detecting, or having detected, the presence or absence of one or more somatic CIDEB mutation in the DNA, RNA, or protein, and (c) administering to the subject an inhibitory nucleic acid that inhibits expression of CIDEB if the one or more CIDEB somatic mutation is detected in the DNA, RNA, or protein.

[0112] In some embodiments, the liver disease is fatty liver, liver inflammation, NASH, NAFLD, obesity-induced metabolic syndrome, insulin insensitivity, obesity, type-2 diabetes, AFLD, cirrhosis, MASLD, MASH, MetALD, SLD, or cryptogenic SLD. In some embodiments, the liver disease is liver fibrosis, cirrhosis, liver failure, jaundice, AFLD, obesity-induced metabolic syndrome, insulin insensitivity, or type-2 diabetes.

[0113] In some embodiments, (a) comprises isolating and purifying DNA, or having DNA isolated and purified, from a sample obtained from the subject; and (b) comprises detecting, or having detected, the presence or absence of the one or more somatic CIDEB mutation in the DNA.

[0114] In some embodiments, the inhibitory nucleic acid molecule comprises a dsRNA agent described herein, a conjugate described herein, a vector described herein, a carrier described herein, a cell (or population of cells) described herein, or a pharmaceutical composition described herein.

[0115] In some embodiments, the treating, ameliorating, or preventing of the liver disease is mediated (at least in part) through the by reducing or inhibiting expression of CIDEB (e.g., hCIDEB) in the subject (e.g., a population of cells within the subject).

[0116] In one aspect, provided herein are in vitro methods of screening a sample from a subject for one or more somatic CIDEB mutation, the method comprising (a) isolating and purifying DNA, RNA, or protein from a sample obtained from the subject; and (b) detecting the presence or absence of one or more somatic CIDEB mutation in the DNA, RNA, or protein.

[0117] In some embodiments, the sample is a blood, tissue, or cell sample. In some embodiments, the sample is biopsy. In some embodiments, the sample is a liver biopsy.

[0118] In some embodiments, at least one of the one or more somatic mutation is a loss of function mutation. In some embodiments, at least one of the one or more somatic mutation is a gain of function mutation.

[0119] In some embodiments, the subject is a human.

[0120] In one aspect, provided herein are dsRNA agents described herein, conjugates described herein, vectors described herein, carriers described herein, cells (or populations of cells) described herein, or pharmaceutical compositions described herein for use in a method of treating, ameliorating, or preventing a CIDEB associated disease (e.g., a CIDEB associated disease described herein) in a subject.

[0121] In one aspect, provided herein are dsRNA agents described herein, conjugates described herein, vectors described herein, carriers described herein, cells (or populations of cells) described herein, or pharmaceutical compositions described herein for use in a method of treating, ameliorating, or preventing a liver disease (e.g., a liver disease described herein) in a subject.

[0122] In one aspect, provided herein are uses of a dsRNA agent described herein, a conjugate described herein, a vector described herein, a carrier described herein, a cell (or population of cells) described herein, or a pharmaceutical composition described herein for the manufacture of a medicament for the treatment, amelioration, or prevention of a CIDEB associated disease (e.g., a CIDEB associated disease described herein) in a subject.

[0123] In one aspect, provided herein are uses of a dsRNA agent described herein, a conjugate described herein, a vector described herein, a carrier described herein, a cell (or population of cells) described herein, or a pharmaceutical composition described herein for the manufacture of a medicament for the treatment, amelioration, or prevention of a liver disease (e.g., a liver disease described herein) in a subject.

### 4. DETAILED DESCRIPTION

[0124] The inventors have further discovered, inter alia, RNAi agents that inhibit expression of CIDEB (e.g., hCIDEB). As such, the RNAi agents described herein are useful for the treatment of CIDEB mediated diseases such as liver diseases (e.g., fatty liver disease, liver inflammation, MASH). As such, the current disclosure provides RNAi agents (e.g., dsRNAi agents comprising a sense strand and an antisense strand) capable of inhibiting CIDEB expression (e.g., in a cell, in a cell in a subject); and their use in, inter alia, pharmaceutical compositions, and methods of treating diseases (e.g., liver diseases).

TABLE OF CONTENTS

| | |
|---|---|
| 4.1 | Definitions |
| 4.2 | RNAi Agents |
| 4.2.1 | Antisense Strand |
| 4.2.1.1 | Targeting Region |
| 4.2.1.2 | Overall Length |
| 4.2.1.3 | Exemplary Antisense Strands |
| 4.2.2 | Sense Strand |
| 4.2.2.1 | Antisense Strand Complementarity |
| 4.2.2.2 | Overall Length |
| 4.2.2.3 | Exemplary Sense Strands |
| 4.2.3 | dsRNA Agents |
| 4.2.3.1 | Single & Multiple Nucleic Acid Molecules |
| 4.2.3.2. | Length of Double Stranded Region |
| 4.2.3.3 | Nucleotide Overhangs & Blunt Ends |
| 4.2.3.4 | Exemplary Structural Combinations of |
| | Sense & Antisense Strands |
| 4.2.3.5 | Exemplary Antisense Strands & Sense Strands |
| 4.2.3.6 | Exemplary dsRNA Agents |
| 4.2.4 | Nature of Nucleotide Modifications |
| 4.2.4.1 | Modified Nucleosides |
| 4.2.4.1(i) | Sugar Modifications |
| 4.2.4.1(i)(a) | Non-Bicyclic Sugar Modifications |
| 4.2.4.1(i)(b) | Bicyclic Sugar Modifications |
| 4.2.4.1(ii) | Nucleobase Modifications |
| 4.2.4.2 | Internucleoside Linkage Modifications |
| 4.2.4.2(i) | Modified Phosphorous Containing |
| | Internucleoside Linkages |
| 4.2.4.2(ii) | Modified Non-Phosphorous Containing |
| | Internucleoside Linkages |
| 4.2.4.3 | Additional Exemplary Nucleotide Modifications |
| 4.2.5 | Extent of Modified Nucleotides |
| 4.3 | Conjugates |
| 4.3.1 | Heterologous Moieties |
| 4.3.1.1 | Targeting Moieties |
| 4.3.1.1(i) | Hepatocyte Targeting Moieties |
| 4.3.2 | Linkers |
| 4.3.2.1 | Cleavable Linkers |
| 4.3.3 | Orientation |
| 4.3.4 | Exemplary Conjugates |
| 4.4 | Activity of RNAi Agents & Conjugates Thereof |
| 4.5 | Methods of Making RNAi Agents & |
| | Conjugates Thereof |
| 4.6 | Vectors |
| 4.7 | Carriers |
| 4.7.1 | Lipid Based Carriers/Lipid Nanoformulations |
| 4.7.1.1 | Cationic Lipids (Positively Charged) |
| | and Ionizable Lipids |
| 4.7.1.2 | Non-Cationic Lipids (e.g., Phospholipids) |
| 4.7.1.3 | Structural Lipids |
| 4.7.1.4 | Polymers and Polyethylene Glycol (PEG)-Lipids |
| 4.7.1.5 | Percentages of Lipid Nanoformulation Components |
| 4.8 | Host Cells |
| 4.9 | Pharmaceutical Compositions |
| 4.10 | Methods of Use |
| 4.10.1 | Methods of Delivery |
| 4.10.2 | Methods of Reducing or Inhibiting CIDEB Expression |
| 4.10.3 | Methods of Treating, Ameliorating, or |
| | Preventing a CIDEB Associated |
| | Disease |
| 4.10.4 | Methods of Treating, Ameliorating, |
| | or Preventing a Liver Disease |
| 4.10.5 | Methods of Diagnosing and/or |
| | Prognosticating a Liver Disease |
| 4.10.6 | Methods of Screening, Identifying, |
| | and Selecting a Subject for Treatment |
| | with a CIDEB Inhibitory Agent |
| 4.10.7 | In Vitro Methods of Screening |
| | Samples for Somatic CIDEB Mutations |
| 4.11 | Kits |

### 4.1 Definitions

[0125] The section headings used herein are for organizational purposes only and are not to be construed as limiting the subject matter described.

[0126] Unless defined otherwise, all technical and scientific terms used herein have the same meaning as is commonly understood by one of skill in the art to which the claimed subject matter belongs. It is to be understood that the foregoing general description and the following detailed description are exemplary and explanatory only and are not restrictive of any subject matter claimed.

[0127] In this application, the use of the singular includes the plural unless specifically stated otherwise. For example, as used in the specification and the appended claims, the singular forms “a,” “an,” and “the” include plural referents unless the context clearly dictates otherwise. Furthermore, use of the term “including” as well as other forms, such as “include,” “includes,” and “included,” is not limiting.

[0128] It is understood that wherever aspects are described herein with the language “comprising,” otherwise analogous aspects described in terms of “consisting of” and “consisting essentially of” are also provided.

[0129] The term “and/or” where used herein is to be taken as specific disclosure of each of the two specified features or components with or without the other. Thus, the term “and/or” as used in a phrase such as “A and/or B” herein is intended to include “A and B,” “A or B,” “A” (alone), and “B” (alone). Likewise, the term “and/or” as used in a phrase such as “A, B, and/or C” is intended to encompass each of the following aspects: A, B, and C; A, B, or C; A or C; A or B; B or C; A and C; A and B; B and C; A (alone); B (alone); and C (alone).

[0130] As described herein, any concentration range, percentage range, ratio range or integer range is to be understood to include the value of any integer within the recited range and, when appropriate, fractions thereof (such as one tenth and one hundredth of an integer), unless otherwise indicated.

[0131] The terms “about” or “comprising essentially of” refer to a value or composition that is within an acceptable error range for the particular value or composition as determined by one of ordinary skill in the art, which will depend in part on how the value or composition is measured or determined, i.e., the limitations of the measurement system. When particular values or compositions are provided in the application and claims, unless otherwise stated, the meaning of “about” or “comprising essentially of” should be assumed to be within an acceptable error range for that particular value or composition.

[0132] As used herein, the term “administering” refers to the physical introduction of an agent, e.g., a therapeutic agent (or a precursor of the therapeutic agent that is metabolized or altered within the body of the subject to produce the therapeutic agent in vivo) to a subject, using any of the various methods and delivery systems known to those skilled in the art. Administering can also be performed, for example, once, a plurality of times, and/or over one or more extended periods. Administration includes administration to a subject by a third party; as well as self-administration by the subject.

[0133] As used herein, the term “agent” is used generically to describe any macro or micro molecule. Exemplary moieties include, but are not limited polypeptides, proteins, peptides, polynucleotides (e.g., DNA, RNA), small molecules, carbohydrates, lipids, synthetic polymers (e.g., polymers of PEG).

[0134] As used herein, the term “antisense strand” refers to an RNA molecule (e.g., part of an RNAi agent (e.g., described herein), part of a dsRNA agent (e.g., described herein)) that comprises a region of complementarity comprising a nucleotide sequence that is at least partially (e.g., substantially, fully) complementary to a target nucleic acid sequence (e.g., a target mRNA (e.g., a CIDEB mRNA), a portion of a target mRNA (e.g., a CIDEB mRNA)).

[0135] As used herein, the term “bicyclic sugar” refers to a modified sugar (e.g., ribose) moiety comprising two rings, wherein the second ring is formed via a bridge connecting two of the atoms in the first ring thereby forming a bicyclic structure. In some embodiments, the first ring of the bicyclic sugar moiety is a furanosyl moiety. In some embodiments, the furanosyl sugar moiety is a ribosyl moiety.

[0136] As used herein, the term “bicyclic nucleoside” (“BNA”) is a nucleoside comprising a bicyclic sugar.

[0137] As used herein, the term “blunt end” refers to a dsRNA molecule that does not contain any unpaired nucleotides at the end (e.g., 3′ terminus, 5′ terminus) of the dsRNA molecule (i.e., no nucleotide overhang(s)). The dsRNA molecule can have, for example, a blunt end at the 3′ end, 5′ end, or both the 3′ and 5′ end of the molecule.

[0138] As used herein, the term “CIDEB” or “cell death inducing DNA fragmentation factor alpha like effector” refers to the lipid droplet-associated protein primarily expressed in the liver and functions, e.g., to promote unilocular lipid droplet formation by mediating lipid droplet fusion. The mRNA sequence of a reference hCIDEB gene is set forth in SEQ ID NO: 1 (NCBI Ref.: NM_014430.4). The amino acid sequence of a reference hCIDEB protein is set forth in SEQ ID NO: 3 (NCBI Ref.: NP_055245). The term CIDEB includes naturally occurring variants of CIDEB. CIDEB gene and mRNA sequences of e.g., human, mouse, rat, non-human primate (e.g., rhesus macaque, Macaca fascicularis (cynomolgus monkey)), are readily available through publicly available databases, including, e.g., GenBank, UniProt, OMIM, and the Macaca genome project web site.

[0139] As used herein, the term “complementary” in reference to a first nucleotide sequence (e.g., a sense strand or a target mRNA) in relation to a second nucleotide sequence (e.g., an antisense strand), refers to the ability of a nucleic acid molecule comprising the first nucleotide sequence to hybridize to a nucleic acid molecule comprising the second nucleotide sequence and form a double stranded region (through base pair hydrogen bonds) under suitable in vivo or vitro conditions (e.g., under certain standard conditions, under mammalian (e.g., human) physiological conditions). A person of ordinary skill in the art would be able to select the set of conditions most appropriate for a hybridization test. Complementary sequences include, e.g., Watson-Crick base pairs. For example, complementary nucleobase pairs include adenine (A) and thymine (T); adenine (A) and uracil (U); and cytosine (C) and guanine (G). Complementary nucleobase pairs include natural and modified nucleotides, and nucleotide mimics, at least to the extent that the above hybridization requirements are fulfilled. As such, determinations of complementarity (as described herein) are independent of nucleotide chemical modifications (e.g., as described herein). For example, (C) and 5-methyl cytosine (mC) are both complementary to (G).

[0140] As used herein, the term “conjugation” refers to chemical conjugation of an agent (e.g., a nucleic acid molecule) with a moiety (e.g., carbohydrate, small molecule, polypeptide, polynucleotide, lipid, synthetic polymer (e.g., polymers of polyethylene glycol (PEG)), etc.). The moiety can be directly connected to the agent (e.g., nucleic acid molecule) or indirectly connected through a linker, e.g., as described herein. Chemical conjugation methods are well known in the art, as are commercially available conjugation reagents and kits, with detailed instructions for their use readily available from the commercial suppliers.

[0141] As used herein, the term “differing by no more than X nucleotides” in reference to a nucleotide sequence means that the nucleotide sequence comprises no more than X (wherein X is a specified number (e.g., 3, 2, 1, 0)) nucleotide variations relative to a reference sequence. For example, the phrase “wherein the nucleotide sequence of the antisense strand differs by no more than 3 nucleotides from the nucleotide sequence of SEQ ID NO: X” means that the nucleotide sequence comprises no more than 3 nucleotide variations relative to the nucleotide sequence set forth in the cited SEQ ID NO: X.

[0142] As used herein, the term “disease” refers to any abnormal condition that impairs physiological function. The term is used broadly to encompass any disorder, illness, abnormality, pathology, sickness, condition, or syndrome in which physiological function is impaired, irrespective of the nature of the etiology. The term disease includes infection (e.g., a viral, bacterial, fungal, protozoal infection). The term disease includes other conditions caused by an infection.

[0143] As used herein, the term “double stranded RNA agent” or “dsRNA agent” refers to a complex of two RNA molecules comprising a double stranded region comprising two anti-parallel and at least partially (e.g., substantially, fully) complementary nucleic acid sequences that form the double stranded region. For example, in some embodiments, the dsRNA agent comprises a sense strand and an antisense strand.

[0144] The terms “DNA” and “polydeoxyribonucleotide” are used interchangeably herein and refer to macromolecules that include multiple deoxyribonucleotides that are polymerized via phosphodiester bonds. Deoxyribonucleotides are nucleotides in which the sugar is deoxyribose.

[0145] As used herein, the term “fully complementary” means that in a hybridized pair of a first nucleic acid molecule and a second nucleic acid molecule, 100% (all), of the bases in a contiguous sequence of the first nucleic acid molecule will hybridize with the same number of bases in a contiguous sequence of the second nucleic acid molecule. The contiguous sequence may comprise all or a part of the first and/or second nucleic acid molecule.

[0146] As used herein, the term “heterologous,” when used to describe a first element in reference to a second element means that the first element and second element do not exist in nature disposed as described. For example, a nucleic acid molecule comprising a “heterologous moiety” means a nucleic acid molecule that is joined to a moiety (e.g., carbohydrate, small molecule, polypeptide, polynucleotide, lipid, synthetic polymer (e.g., polymers of PEG), etc.) that is not joined to the nucleic acid molecule in nature.

[0147] As used herein, the term “isolated” with reference to a polypeptide, protein, or polynucleotide refers to a polypeptide, protein, or polynucleotide that is substantially free of other cellular components with which it is associated in the natural state.

[0148] As used herein, the term “nucleotide variation,” “variant nucleotide,” or use of the term “variation” and the like in reference to a nucleotide or nucleic acid sequence refers to a nucleic acid molecule that comprises at least one substitution, addition, deletion, or inversion of one or more nucleotide compared to a reference nucleic acid molecule. As used herein, the term “variant” or “variation” with reference to a peptide or protein refers to a peptide or protein that comprises at least one substitution, addition, deletion, or inversion of an amino acid residue compared to a reference peptide or protein.

[0149] As used herein, the term “modified agent” refers to any agent (or any component thereof (e.g., any nucleic acid molecule thereof)) (e.g., described herein, e.g., an antisense strand, a sense strand, a dsRNA agent, RNAi agent, etc.) that comprises one or more modified nucleotide (as defined herein).

[0150] As used herein, the term “modified nucleotide,” “nucleotide modification,” or use of the term “modification” and the like in reference to a nucleotide or nucleic acid sequence refers to a nucleotide comprising a chemical modification, e.g., a modified sugar moiety, a modified nucleobase, and/or a modified internucleoside linkage, or any combination thereof. Exemplary modifications are provided herein, see, e.g., §§ 4.3, 4.3.1. In certain embodiments of the instant disclosure, inclusion of a deoxynucleotide-which is acknowledged as a naturally occurring form of nucleotide-if present within an RNAi agent or component thereof (e.g., described herein, e.g., a sense strand, an antisense strand, a dsRNA agent) is considered to constitute a modified nucleotide.

[0151] As used herein, the term “moiety” is used generically to describe any macro or micro molecule that can be operably connected to a protein described herein. Exemplary moieties include, but are not limited small molecules, polypeptides, polynucleotides (e.g., DNA, RNA), carbohydrates, lipids, synthetic polymers (e.g., polymers of PEG).

[0152] As used herein, the term “nucleotide overhang” refers to at least one unpaired nucleotide that extends from the double stranded region of a nucleic acid molecule (e.g., a dsRNA molecule (e.g., a dsRNA molecule described herein)). For example, when a 3′-end of one strand of a dsRNA extends beyond the 5′-end of the other strand, or vice versa, there is a nucleotide overhang.

[0153] As used herein, the term, “non-complementary nucleotide mismatch” refers to a nucleotide within a region of complementarity (as described herein) that is not complementary to the corresponding nucleotide in the target nucleic acid molecule.

[0154] As used herein, the term “operably connected” refers to the linkage of two moieties in a functional relationship. For example, a polypeptide is operably connected to another polypeptide when they are linked (either directly or indirectly via a peptide linker) in frame such that both polypeptides are functional (e.g., a fusion protein described herein). Or for example, a transcription regulatory polynucleotide e.g., a promoter, enhancer, or other expression control element is operably linked to a polynucleotide that encodes a protein if it affects the transcription of the polynucleotide that encodes the protein. The term “operably connected” can also refer to the conjugation of a moiety to e.g., a polynucleotide or polypeptide (e.g., the conjugation of a PEG polymer to a protein).

[0155] As used herein, “partially complementary” means that in a hybridized pair of a first nucleic acid molecule and a second nucleic acid molecule, at least 70%, but not all, of the bases in a contiguous sequence of the first nucleic acid molecule will hybridize with the same number of bases in a contiguous sequence of the second nucleic acid molecule. The contiguous sequence may comprise all or a part of a first or second nucleic acid molecule.

[0156] The determination of “percent identity” between two sequences (e.g., protein (amino acid sequences) or polynucleotide (nucleic acid sequences)) can be accomplished using a mathematical algorithm. Determinations of identity (as described herein) are independent of nucleotide chemical modifications (e.g., as described herein). For example, (mC) is identical to (C) for the purposes of determining identity. A specific, non-limiting example of a mathematical algorithm utilized for the comparison of two sequences is the algorithm of Karlin S & Altschul SF (1990) PNAS 87:2264-2268, modified as in Karlin S & Altschul SF (1993) PNAS 90:5873-5877, each of which is herein incorporated by reference in its entirety. Such an algorithm is incorporated into the NBLAST and XBLAST programs of Altschul S F et al., (1990) J Mol Biol 215:403, which is herein incorporated by reference in its entirety. BLAST nucleotide searches can be performed with the NBLAST nucleotide program parameters set, e.g., for score=100, wordlength=12 to obtain nucleotide sequences homologous to a nucleic acid molecule described herein. BLAST protein searches can be performed with the XBLAST program parameters set, e.g., to score 50, wordlength=3 to obtain amino acid sequences homologous to a protein molecule described herein. To obtain gapped alignments for comparison purposes, Gapped BLAST can be utilized as described in Altschul S F et al., (1997) Nuc Acids Res 25:3389-3402, which is herein incorporated by reference in its entirety. Alternatively, PSI BLAST can be used to perform an iterated search which detects distant relationships between molecules (Id.). When utilizing BLAST, Gapped BLAST, and PSI Blast programs, the default parameters of the respective programs (e.g., of XBLAST and NBLAST) can be used (see, e.g., National Center for Biotechnology Information (NCBI) on the worldwide web, ncbi.nlm.nih.gov). Another specific, non-limiting example of a mathematical algorithm utilized for the comparison of sequences is the algorithm of Myers and Miller, 1988, CABIOS 4:11-17, which is herein incorporated by reference in its entirety. Such an algorithm is incorporated in the ALIGN program (version 2.0) which is part of the GCG sequence alignment software package. When utilizing the ALIGN program for comparing amino acid sequences, a PAM120 weight residue table, a gap length penalty of 12, and a gap penalty of 4 can be used. The percent identity between two sequences can be determined using techniques similar to those described above, with or without allowing gaps. In calculating percent identity, typically only exact matches are counted.

[0157] As used herein, the term “pharmaceutical composition” means a composition that is suitable for administration to an animal, e.g., a human subject, and comprises a therapeutic agent and a pharmaceutically acceptable carrier or diluent. A “pharmaceutically acceptable carrier or diluent” means a substance intended for use in contact with the tissues of human beings and/or non-human animals, and without excessive toxicity, irritation, allergic response, or other problem or complication, commensurate with a reasonable therapeutic benefit/risk ratio.

[0158] The terms “nucleic acid molecule” and “polynucleotide” are used interchangeably herein and refer to a polymer of DNA or RNA. The nucleic acid molecule can be single-stranded or double-stranded; contain natural, non-natural, or altered nucleotides; and contain a natural, non-natural, or altered internucleoside linkage, such as a phosphoroamidate linkage or a phosphorothioate linkage, instead of the phosphodiester found between the nucleotides of an unmodified nucleic acid molecule. Nucleic acid molecules include, but are not limited to, all nucleic acid molecules which are obtained by any means available in the art, including, without limitation, recombinant means, e.g., the cloning of nucleic acid molecules from a recombinant library or a cell genome, using ordinary cloning technology and polymerase chain reaction, and the like, and by synthetic means. The skilled artisan will appreciate that, except where otherwise noted, nucleic acid sequences set forth in the instant application will recite thymidine (T) in a representative DNA sequence but where the sequence represents RNA (e.g., mRNA), the thymidines (Ts) would be substituted for uracils (Us). Thus, any of the RNA polynucleotides encoded by a DNA identified by a particular sequence identification number may also comprise the corresponding RNA (e.g., mRNA) sequence encoded by the DNA, where each thymidine (T) of the DNA sequence is substituted with uracil (U).

[0159] As used herein, the term “plurality” means 2 or more (e.g., 3 or more, 4 or more, 5 or more, 6 or more, 7 or more, 9 or more, or 10 or more).

[0160] As used herein, the terms “protein” and “polypeptide” refers to a polymer of at least 2 (e.g., at least 5) amino acids linked by a peptide bond. The term “polypeptide” does not denote a specific length of the polymer chain of amino acids. It is common in the art to refer to shorter polymers of amino acids (e.g., approximately 2-50 amino acids) as peptides; and to refer to longer polymers of amino acids (e.g., approximately over 50 amino acids) as polypeptides. However, the terms “peptide” and “polypeptide” and “protein” are used interchangeably herein. In some embodiments, the protein is folded into its three-dimensional structure. Where proteins are contemplated herein, it should be understood that proteins folded into their three-dimensional structure are also provided herein.

[0161] As used herein, the term “region of complementarity” refers to a portion of a first nucleic acid molecule comprising a nucleotide sequence that is at least partially complementary to the nucleotide sequence of at least a portion of a second nucleic acid molecule.

[0162] The terms “RNA” and “polyribonucleotide” are used interchangeably herein and refer to macromolecules that include multiple ribonucleotides that are polymerized via phosphodiester bonds. Ribonucleotides are nucleotides in which the sugar is ribose. RNA may contain modified nucleotides; and contain natural, non-natural, or altered internucleoside linkages, such as a phosphoroamidate linkage or a phosphorothioate linkage, instead of the phosphodiester found between the nucleotides of an unmodified nucleic acid molecule.

[0163] As used herein, the term “RNAi agent” refers to an agent that contains one or more RNA molecules which can mediate the targeted cleavage of an RNA molecule (e.g., an mRNA molecule) via an RNA-induced silencing complex (RISC) pathway. The RNAi agent, is thereby capable of e.g., modulating, e.g., inhibiting, the expression of a target gene (e.g., CIDEB) in a cell, e.g., a cell within a subject, such as a mammalian subject. In some embodiments, the RNAi agent is a dsRNA agent comprising a sense strand and an antisense strand that form a double stranded region, wherein optionally the sense strand and the antisense strand each independently comprise or consist of from about 19-23 nucleotides.

[0164] As used herein, the term “sense strand” refers to an RNA molecule (e.g., part of an RNAi agent (e.g., described herein), part of a dsRNA agent (e.g., described herein)) that comprises a region that is at least partially (e.g., substantially, fully) complementary to a region of the antisense strand (as defined herein). The sense strand is often referred to as such with reference to the orientation of the sequence of the sense strand being the same with respect to a target RNA (e.g., mRNA sequence).

[0165] As used herein, the term “subject” includes any animal, such as a human or other animal. In some embodiments, the subject is a vertebrate animal (e.g., mammal, bird, fish, reptile, or amphibian). In some embodiments, the subject is a human. In some embodiments, the method subject is a non-human mammal. In some embodiments, the subject is a non-human mammal is such as a non-human primate (e.g., monkeys, apes), ungulate (e.g., cattle, buffalo, sheep, goat, pig, camel, llama, alpaca, deer, horses, donkeys), carnivore (e.g., dog, cat), rodent (e.g., rat, mouse), or lagomorph (e.g., rabbit). In some embodiments, the subject is a bird, such as a member of the avian taxa Galliformes (e.g., chickens, turkeys, pheasants, quail), Anseriformes (e.g., ducks, geese), Palcaognathac (e.g., ostriches, emus), Columbiformes (e.g., pigeons, doves), or Psittaciformes (e.g., parrots).

[0166] As used herein, “substantially complementary” means that in a hybridized pair of a first nucleic acid molecule and a second nucleic acid molecule, at least 85%, but not all, of the bases in a contiguous sequence of the first nucleic acid molecule will hybridize with the same number of bases in a contiguous sequence of the second nucleic acid molecule. The contiguous sequence may comprise all or a part of a first or second nucleic acid molecule.

[0167] In some embodiments, the term “substantially all” means at least 95%, 96%, 97%, 98% or 99%, e.g., of the subject of said sentence. The term “substantially all” preferably excludes 100%. For example, in some embodiments, the term “substantially all of the nucleotides in the sense strand and/or antisense strand are modified” means that at least 95%, 96%, 97%, 98% or 99% of said nucleotides are modified. For example, in some embodiments, the term “substantially all of the nucleotides of the agent are modified” means that at least 95%, 96%, 97%, 98% or 99% of said nucleotides are modified. For example, in some embodiments, the term “substantially all of the nucleotides of the agent are unmodified” means that at least 95%, 96%, 97%, 98% or 99% of said nucleotides are unmodified. For example, in some embodiments the term “wherein the dsRNA agent is in the sodium salt form, sodium ions are present in the composition comprising the dsRNA agent as counterions for substantially all of the phosphodiester or phosphorothioate groups present in the dsRNA agent” means that wherein the dsRNA agent is in the sodium salt form, sodium ions are present in the composition comprising the dsRNA agent as counterions for at least 95%, 96%, 97%, 98% or 99% of the phosphodiester or phosphorothioate groups present in the dsRNA agent.

[0168] As used herein, the term “target nucleic acid sequence” refers to a contiguous portion of the nucleotide sequence of a nucleic acid sequence (e.g., an mRNA molecule formed during the transcription of a target gene (e.g., CIDEB)). In some embodiments, the target nucleic acid sequence is an mRNA molecule formed during the transcription of a target gene (e.g., CIDEB)). In some embodiments, the target nucleic acid molecule comprises an mRNA that is a product of RNA processing of a primary transcription product. The target portion of the sequence (e.g., mRNA) will be at least long enough to serve as a substrate for RNAi-directed cleavage at or near that portion of the nucleotide sequence of an mRNA molecule formed during the transcription of a CIDEB gene. In one embodiment, the target sequence is within the protein coding region of CIDEB.

[0169] As used herein, the term “therapeutically effective amount” of a therapeutic agent refers to any amount of the therapeutic agent that, when used alone or in combination with another therapeutic agent, improves a disease condition, e.g., protects a subject against the onset of a disease (or infection); improves a symptom of disease or infection, e.g., decreases severity of disease or infection symptoms, decreases frequency or duration of disease or infection symptoms, increases disease or infection symptom-free periods; prevents or reduces impairment or disability due to the disease or infection; or promotes disease (or infection) regression. The ability of a therapeutic agent to improve a disease condition can be evaluated using a variety of methods known to the skilled practitioner, such as in human subjects during clinical trials, in animal model systems predictive of efficacy in humans, or by assaying the activity of the agent in in vitro assays.

[0170] As used herein, the terms “treat,” treating,” “treatment,” and the like refer to reducing or ameliorating a disease and/or symptom(s) associated therewith or obtaining a desired pharmacologic and/or physiologic effect. It will be appreciated that, although not precluded, treating a disease does not require that the disease, or symptom(s) associated therewith be completely eliminated. In some embodiments, the effect is therapeutic, i.e., without limitation, the effect partially or completely reduces, diminishes, abrogates, abates, alleviates, decreases the intensity of, or cures a disease and/or adverse symptom attributable to the disease. In some embodiments, the effect is preventative, i.e., the effect protects or prevents an occurrence or reoccurrence of a disease. To this end, the presently disclosed methods comprise administering a therapeutically effective amount of a compositions as described herein.

### 4.2 RNAi Agents

[0171] Provided herein are, inter alia, agents (e.g., RNAi agents, dsRNA agents), useful in, inter alia, inhibiting expression of cell death inducing DFFA like effector B (CIDEB) (e.g., human CIDEB (hCIDEB)) (e.g., within a cell, e.g., within a cell in a subject, e.g., a mammalian subject, e.g., a human subject) (e.g., through the degradation of CIDEB (e.g., hCIDEB) mRNA).

[0172] CIDEB is a lipid droplet-associated protein primarily expressed in the liver and functions, e.g., to promote unilocular lipid droplet formation by mediating lipid droplet fusion. The mRNA sequence of a reference hCIDEB gene is set forth in SEQ ID NO: 1 (NCBI Ref.: NM_014430.4). The reverse complement sequence of the hCIDEB mRNA is set forth in SEQ ID NO: 2. The amino acid sequence of a reference hCIDEB protein is set forth in SEQ ID NO: 3 (NCBI Ref.: NP_055245). See Table 1, herein.

TABLE 1
The mRNA and Amino Acid Sequence of a Reference hCIDEB Protein.

| | | SEQ ID |
|---|---|---|
| Description | Amino Acid Sequence | NO |
| hCIDEB mRNA | CCCUUCCGGUGGAGCCAGCGCUGCGACCGCCUGCAGAAGGUUGACUGC | 1 |
| NCBI Ref.: | GUGGUAGGGGGCCCAGAGCAAGCCGAAGGCAAGCACGAUGGCGCUCAC | |
| NM_014430.4 | CAGCCGGCCCACCCGCGCCCCGUGCCGCCCGGAGCCCCAGCGGGCGCC | |
| | CCGCAGCCGUGCCAGCGUCACGCUGUAGCAGCCGAGCAUCAGCCCGAA | |
| | AGGAAGCACGAAAGCGGUCAGAGUCUCCAGGCUCAGGUGGGCGGCGGC | |
| | GUGGACCGGCGACGGGUGGCACAGCUGGCAUACGCGGUCCCUCCACAG | |
| | GUGGCGGUAGACGGCGGCCGGGACGGCGAGCAACAGGGCGGCCAGCCA | |
| | GACCGCCAGCAGCAGGCGGCGGGCCAGGGCCGGGCUGCGCAGCCGAGG | |
| | CGCCAGGAAGGGGCGGGUGACUGCGAGGCAGCGCUGCAGGCUGAGCAG | |
| | GCCGGUGAGCAGCACGCUGGCGUACAUGCUGAGCGCGCACACGUAGUA | |
| | CACCGCCUUGCAGCCCGCCUGGCCCAGCGGCCAGGCCUGCCGGGUCAG | |
| | GAAGGCCACAAAGAGCGGCGUGAGCAGCAGCACCGCGCCGUCGGCCAG | |
| | CGCCAGGUGCAGCACAAGCGUGGCCGCCAGCGGUCGCCCCCGUGCAGG | |
| | CCGCCAGCCCGCCAAGCUCCACACCACGAAGCCGUUGCCAGGCAGCCC | |
| | CAGCAGCGCCGCCAGCAGCAGGAAGGCUGUGCCUGUGGCCCGCGAAGU | |
| | CUUCCAGCUCAGCAGUGUCUCGUUCCCUGGGGGACGGUAGCAGACCGA | |
| | CAUCCUUCUGGGCCUACAGGACACAGAAAAAAAGUGGGGAAGCUGGGG | |
| | GACCCUACAAGGAUCCUUGGCAGGAAAGCAGGGAUUGUGUUCAUUUGA | |
| | GGGUUUCACUGUCAGUGAGAGUCUCAGCUUCCAUGCAACUGUCCAUCA | |
| | CGGCUGCAACUGAAAUCAGAGCUGGGACACAGCGCACCAGAAGCUAAA | |
| | GUCUUGAUGCCAUCAAAGGACAUCCCUGCCCCAUUCACAUCUCUGUCA | |
| | CGUCCACUAAUCGGCAAAAGGAGAAAAGUGAGAGAAGAUGACCUAAGU | |
| | GUGACUGCAGCAGGCAGCUCUGGAAAAUGAAGCCAGAGCAGUGAGCCA | |
| | GCCCCUCCUCCGACCAAGGAGGAAGGAAAGAGCAGCCCCAGCACAGGA | |
| | GAGAACCACCCAGCCCAGAAGUUCCAGGGAAGGAACUCUCCGGUCCAC | |
| | CAUGGAGUACCUCUCAGCUCUGAACCCCAGUGACUUACUCAGGUCAGU | |
| | AUCUAAUAUAAGCUCGGAGUUUGGACGGAGGGUCUGGACCUCAGCUCC | |
| | ACCACCCCAGCGACCUUUCCGUGUCUGUGAUCACAAGCGGACCAUCCG | |
| | GAAAGGCCUGACAGCUGCCACCCGCCAGGAGCUGCUAGCCAAAGCAUU | |
| | GGAGACCCUACUGCUGAAUGGAGUGCUAACCCUGGUGCUAGAGGAGGA | |
| | UGGAACUGCAGUGGACAGUGAGGACUUCUUCCAGCUGCUGGAGGAUGA | |
| | CACGUGCCUGAUGGUGUUGCAGUCUGGUCAGAGCUGGAGCCCUACAAG | |
| | GAGUGGAGUGCUGUCAUAUGGCCUGGGACGGGAGAGGCCCAAGCACAG | |
| | CAAGGACAUCGCCCGAUUCACCUUUGACGUGUACAAGCAAAACCCUCG | |
| | AGACCUCUUUGGCAGCCUGAAUGUCAAAGCCACAUUCUACGGGCUCUA | |
| | CUCUAUGAGUUGUGACUUUCAAGGACUUGGCCCAAAGAAAGUACUCAG | |
| | GGAGCUCCUUCGUUGGACCUCCACACUGCUGCAAGGCCUGGGCCAUAU | |
| | GUUGCUGGGAAUUUCCUCCACCCUUCGUCAUGCAGUGGAGGGGGCUGA | |
| | GCAGUGGCAGCAGAAGGGCCGCCUCCAUUCCUACUAAGGGGCUCUGAG | |
| | CUUCUGCCCCCAGAAUCAUUCCAACCGACCCACUGCAAAGACUAUGAC | |
| | AGCAUCAAAUUUCAGGACCUGCAGACAGUACAGGCUAGAUAACCCACC | |
| | CAAUUUCCCCACUGUCCUCUGAUCCCCUCGUGACAGAACCUUUCAGCA | |
| | UAACGCCUCACAUCCCAAGUCUAUACCCUUACCUGAAGAAUGCUGUUC | |
| | UUUCCUAGCCACCUUUCUGGCCUCCCACUUGCCCUGAAAGGCCAAGAU | |
| | CAAGAUGUCCCCCAGGCAUCUUGAUCCCAGCCUGACUGCUGCUACAUC | |
| | UAAUCCCCUACCAAUGCCUCCUGUCCCUAAACUCCCCAGCAUACUGAU | |
| | GACAGCCCUCUCUGACUUUACCUUGAGAUCUGUCUUCAUACCCUUCCC | |
| | CUCAAACUAACAAAAACAUUUCCAAUAAAAAUAUCAAAUAUUUACCAC | |
| | UAA | |
| Reverse | UUAGUGGUAAAUAUUUGAUAUUUUUAUUGGAAAUGUUUUUGUUAGUUU | 2 |
| Complement | GAGGGGAAGGGUAUGAAGACAGAUCUCAAGGUAAAGUCAGAGAGGGCU | |
| of hCIDEB | GUCAUCAGUAUGCUGGGGAGUUUAGGGACAGGAGGCAUUGGUAGGGGA | |
| mRNA | UUAGAUGUAGCAGCAGUCAGGCUGGGAUCAAGAUGCCUGGGGGACAUC | |
| | UUGAUCUUGGCCUUUCAGGGCAAGUGGGAGGCCAGAAAGGUGGCUAGG | |
| | AAAGAACAGCAUUCUUCAGGUAAGGGUAUAGACUUGGGAUGUGAGGCG | |
| | UUAUGCUGAAAGGUUCUGUCACGAGGGGAUCAGAGGACAGUGGGGAAA | |
| | UUGGGUGGGUUAUCUAGCCUGUACUGUCUGCAGGUCCUGAAAUUUGAU | |
| | GCUGUCAUAGUCUUUGCAGUGGGUCGGUUGGAAUGAUUCUGGGGGCAG | |
| | AAGCUCAGAGCCCCUUAGUAGGAAUGGAGGCGGCCCUUCUGCUGCCAC | |
| | UGCUCAGCCCCCUCCACUGCAUGACGAAGGGUGGAGGAAAUUCCCAGC | |
| | AACAUAUGGCCCAGGCCUUGCAGCAGUGUGGAGGUCCAACGAAGGAGC | |
| | UCCCUGAGUACUUUCUUUGGGCCAAGUCCUUGAAAGUCACAACUCAUA | |
| | GAGUAGAGCCCGUAGAAUGUGGCUUUGACAUUCAGGCUGCCAAAGAGG | |
| | UCUCGAGGGUUUUGCUUGUACACGUCAAAGGUGAAUCGGGCGAUGUCC | |
| | UUGCUGUGCUUGGGCCUCUCCCGUCCCAGGCCAUAUGACAGCACUCCA | |
| | CUCCUUGUAGGGCUCCAGCUCUGACCAGACUGCAACACCAUCAGGCAC | |
| | GUGUCAUCCUCCAGCAGCUGGAAGAAGUCCUCACUGUCCACUGCAGUU | |
| | CCAUCCUCCUCUAGCACCAGGGUUAGCACUCCAUUCAGCAGUAGGGUC | |
| | UCCAAUGCUUUGGCUAGCAGCUCCUGGCGGGUGGCAGCUGUCAGGCCU | |
| | UUCCGGAUGGUCCGCUUGUGAUCACAGACACGGAAAGGUCGCUGGGGU | |
| | GGUGGAGCUGAGGUCCAGACCCUCCGUCCAAACUCCGAGCUUAUAUUA | |
| | GAUACUGACCUGAGUAAGUCACUGGGGUUCAGAGCUGAGAGGUACUCC | |
| | AUGGUGGACCGGAGAGUUCCUUCCCUGGAACUUCUGGGCUGGGUGGUU | |
| | CUCUCCUGUGCUGGGGCUGCUCUUUCCUUCCUCCUUGGUCGGAGGAGG | |
| | GGCUGGCUCACUGCUCUGGCUUCAUUUUCCAGAGCUGCCUGCUGCAGU | |
| | CACACUUAGGUCAUCUUCUCUCACUUUUCUCCUUUUGCCGAUUAGUGG | |
| | ACGUGACAGAGAUGUGAAUGGGGCAGGGAUGUCCUUUGAUGGCAUCAA | |
| | GACUUUAGCUUCUGGUGCGCUGUGUCCCAGCUCUGAUUUCAGUUGCAG | |
| | CCGUGAUGGACAGUUGCAUGGAAGCUGAGACUCUCACUGACAGUGAAA | |
| | CCCUCAAAUGAACACAAUCCCUGCUUUCCUGCCAAGGAUCCUUGUAGG | |
| | GUCCCCCAGCUUCCCCACUUUUUUUCUGUGUCCUGUAGGCCCAGAAGG | |
| | AUGUCGGUCUGCUACCGUCCCCCAGGGAACGAGACACUGCUGAGCUGG | |
| | AAGACUUCGCGGGCCACAGGCACAGCCUUCCUGCUGCUGGCGGCGCUG | |
| | CUGGGGCUGCCUGGCAACGGCUUCGUGGUGUGGAGCUUGGCGGGCUGG | |
| | CGGCCUGCACGGGGGCGACCGCUGGCGGCCACGCUUGUGCUGCACCUG | |
| | GCGCUGGCCGACGGCGCGGUGCUGCUGCUCACGCCGCUCUUUGUGGCC | |
| | UUCCUGACCCGGCAGGCCUGGCCGCUGGGCCAGGCGGGCUGCAAGGCG | |
| | GUGUACUACGUGUGCGCGCUCAGCAUGUACGCCAGCGUGCUGCUCACC | |
| | GGCCUGCUCAGCCUGCAGCGCUGCCUCGCAGUCACCCGCCCCUUCCUG | |
| | GCGCCUCGGCUGCGCAGCCCGGCCCUGGCCCGCCGCCUGCUGCUGGCG | |
| | GUCUGGCUGGCCGCCCUGUUGCUCGCCGUCCCGGCCGCCGUCUACCGC | |
| | CACCUGUGGAGGGACCGCGUAUGCCAGCUGUGCCACCCGUCGCCGGUC | |
| | CACGCCGCCGCCCACCUGAGCCUGGAGACUCUGACCGCUUUCGUGCUU | |
| | CCUUUCGGGCUGAUGCUCGGCUGCUACAGCGUGACGCUGGCACGGCUG | |
| | CGGGGCGCCCGCUGGGGCUCCGGGCGGCACGGGGCGCGGGUGGGCCGG | |
| | CUGGUGAGCGCCAUCGUGCUUGCCUUCGGCUUGCUCUGGGCCCCCUAC | |
| | CACGCAGUCAACCUUCUGCAGGCGGUCGCAGCGCUGGCUCCACCGGAA | |
| | GGG | |
| hCIDEB | MEYLSALNPSDLLRSVSNISSEFGRRVWTSAPPPQRPFRVCDHKRTIR | 3 |
| Protein | KGLTAATRQELLAKALETLLLNGVLTLVLEEDGTAVDSEDFFQLLEDD | |
| NCBI Ref.: | TCLMVLQSGQSWSPTRSGVLSYGLGRERPKHSKDIARFTFDVYKQNPR | |
| NP_055245 | DLFGSLNVKATFYGLYSMSCDFQGLGPKKVLRELLRWTSTLLQGLGHM | |
| | LLGISSTLRHAVEGAEQWQQKGRLHSY | |

[0173] In some embodiments, the agent (e.g., RNAi agent, dsRNA agent) comprises one or more RNA molecule. In some embodiments, the agent (e.g., RNAi agent, dsRNA agent) comprises an antisense strand. In some embodiments, the agent (e.g., RNAi agent, dsRNA agent) comprises a sense strand. In some embodiments, the agent comprises one or more single stranded RNA (ssRNA) molecules. In some embodiments, the agent (e.g., RNAi agent, dsRNA agent) comprises a dsRNA agent.

[0174] In some embodiments, the agent (e.g., RNAi agent) comprises a dsRNA agent comprising a sense strand and an antisense strand. In some embodiments, the agent (e.g., RNAi agent) comprises a dsRNA agent comprising a sense strand and an antisense strand that form a double stranded region. In some embodiments, the agent (e.g., RNAi agent) comprises a dsRNA agent comprising a sense strand and an antisense strand that hybridize to form a double stranded region. In some embodiments, the sense strand and the antisense strand are part of a single nucleic acid molecule (e.g., a single nucleic acid molecule comprising a hairpin loop). In some embodiments, the sense strand and the antisense strand are separate nucleic acid molecules.

### 4.2.1 Antisense Strand

### 4.2.1.1 Targeting Region

[0175] As described above, antisense strands (e.g., described herein) comprise a region of complementarity that comprises a nucleotide sequence that is at least partially (e.g., substantially, fully) complementary to the nucleotide sequence of a target nucleic acid molecule (e.g., a target mRNA (e.g., a CIDEB mRNA), a portion of a target mRNA (e.g., a CIDEB mRNA)). In some embodiments, the nucleotide sequence of the region of complementarity is at least substantially complementary to the nucleotide sequence of the target nucleic acid molecule (e.g., a target mRNA (e.g., a CIDEB mRNA), a portion of a target mRNA (e.g., a CIDEB mRNA)). In some embodiments, the nucleotide sequence of the region of complementarity is fully complementary to the nucleotide sequence of the target nucleic acid molecule (e.g., a target mRNA (e.g., a CIDEB mRNA), a portion of a target mRNA (e.g., a CIDEB mRNA)).

[0176] In some embodiments, the nucleotide sequence of the region of complementarity is at least 70%, 75%, 80%, 85%, 90%, 91%, 92%, 93%, 94%, 95%, 96%, 97%, 98%, 99%, or 100% complementary to the nucleotide sequence of the target nucleic acid molecule (e.g., a target mRNA (e.g., a CIDEB mRNA), a portion of a target mRNA (e.g., a CIDEB mRNA)). For example, the nucleotide sequence of the region of complementarity may be at least 70% complementary to the nucleotide sequence of the target nucleic acid molecule (e.g., a target mRNA (e.g., a CIDEB mRNA), a portion of a target mRNA (e.g., a CIDEB mRNA)). The nucleotide sequence of the region of complementarity may be at least 75% complementary to the nucleotide sequence of the target nucleic acid molecule (e.g., a target mRNA (e.g., a CIDEB mRNA), a portion of a target mRNA (e.g., a CIDEB mRNA)). The nucleotide sequence of the region of complementarity may be at least 80% complementary to the nucleotide sequence of the target nucleic acid molecule (e.g., a target mRNA (e.g., a CIDEB mRNA), a portion of a target mRNA (e.g., a CIDEB mRNA)). The nucleotide sequence of the region of complementarity may be at least 85% complementary to the nucleotide sequence of the target nucleic acid molecule (e.g., a target mRNA (e.g., a CIDEB mRNA), a portion of a target mRNA (e.g., a CIDEB mRNA)). The nucleotide sequence of the region of complementarity may be at least 90% complementary to the nucleotide sequence of the target nucleic acid molecule (e.g., a target mRNA (e.g., a CIDEB mRNA), a portion of a target mRNA (e.g., a CIDEB mRNA)). The nucleotide sequence of the region of complementarity may be at least 95% complementary to the nucleotide sequence of the target nucleic acid molecule (e.g., a target mRNA (e.g., a CIDEB mRNA), a portion of a target mRNA (e.g., a CIDEB mRNA)). In some embodiments, the nucleotide sequence of the region of complementarity is at least 80%, 85%, 90%, 91%, 92%, 93%, 94%, 95%, 96%, 97%, 98%, 99%, or 100% complementary to the nucleotide sequence of the target nucleic acid molecule (e.g., a target mRNA (e.g., a CIDEB mRNA), a portion of a target mRNA (e.g., a CIDEB mRNA)). In some embodiments, the nucleotide sequence of the region of complementarity is at least 95%, 96%, 97%, 98%, 99%, or 100% (e.g., in some embodiments, preferably at least 95%, more preferably at least 98%) complementary to the nucleotide sequence of the target nucleic acid molecule (e.g., a target mRNA (e.g., a CIDEB mRNA), a portion of a target mRNA (e.g., a CIDEB mRNA)). In some embodiments, the nucleotide sequence of the region of complementarity is 100% complementary to the nucleotide sequence of the target nucleic acid molecule (e.g., a target mRNA (e.g., a CIDEB mRNA), a portion of a target mRNA (e.g., a CIDEB mRNA)).

[0177] In some embodiments, the nucleotide sequence of the region of complementarity comprises or consists of one or more non-complementary nucleotide mismatches relative to the nucleotide sequence of the target nucleic acid molecule (e.g., a target mRNA (e.g., a CIDEB mRNA), a portion of a target mRNA (e.g., a CIDEB mRNA)). In some embodiments, the nucleotide sequence of the region of complementarity comprises or consists of no more than 5 (e.g., 4, 3, 2, 1, or 0) non-complementary nucleotide mismatches relative to the nucleotide sequence of the target nucleic acid molecule. In some embodiments, the nucleotide sequence of the region of complementarity comprises or consists of no more than 3 (e.g., 2, 1, or 0) non-complementary nucleotide mismatches relative to the nucleotide sequence of the target nucleic acid molecule. In some embodiments, the nucleotide sequence of the region of complementarity comprises or consists of no more than 2 (e.g., 1 or 0) non-complementary nucleotide mismatches relative to the nucleotide sequence of the target nucleic acid molecule. In some embodiments, the nucleotide sequence of the region of complementarity comprises or consists of no more than 1 (e.g., 0) non-complementary nucleotide mismatch relative to the nucleotide sequence of the target nucleic acid molecule. In some embodiments, the nucleotide sequence of the region of complementarity comprises 0 non-complementary nucleotide mismatches relative to the nucleotide sequence of the target nucleic acid molecule. In some embodiments, the region of complementarity comprises one or more (e.g., 2, 3, or more) non-complementary nucleotide mismatches relative to the nucleotide sequence of the target nucleic acid molecule, wherein the one or more non-complementary nucleotide mismatches are within the last 5 (e.g., 4, 3, 2, or 1) nucleotides from either the 5′- and/or 3′-end of the region of complementarity. In some embodiments, the region of complementarity comprises at least one but not more than 3 non-complementary nucleotide mismatches relative to the nucleotide sequence of the target nucleic acid molecule, wherein the one or more non-complementary nucleotide mismatches are within the last 5 (e.g., 4, 3, 2, or 1) nucleotides from either the 5′- and/or 3′-end of the region of complementarity. In some embodiments, the region of complementarity comprises one or more (e.g., 2, 3, or more) non-complementary nucleotide mismatches relative to the nucleotide sequence of the target nucleic acid molecule, wherein the one or more non-complementary nucleotide mismatches are within the last 3 (e.g., 2 or 1) nucleotides from either the 5′- and/or 3′-end of the region of complementarity. In some embodiments, the region of complementarity comprises at least one but not more than 3 non-complementary nucleotide mismatches relative to the nucleotide sequence of the target nucleic acid molecule, wherein the one or more non-complementary nucleotide mismatches are within the last 3 (e.g., 2 or 1) nucleotides from either the 5′- and/or 3′-end of the region of complementarity. Methods known in the art and described herein can be utilized to evaluate the effect of any non-complementary mismatches between an antisense strand and a target nucleic acid molecule on functional properties (e.g., inhibition of expression of the target nucleic acid molecule (e.g., a target mRNA (e.g., a CIDEB mRNA), a portion of a target mRNA (e.g., a CIDEB mRNA))).

[0178] In some embodiments, the region of complementarity comprises or consists of from about 15-30 nucleotides, e.g., 15-29, 15-28, 15-27, 15-26, 15-25, 15-24, 15-23, 15-22, 15-21, 15-20, 15-19, 15-18, 15-17, 18-30, 18-29, 18-28, 18-27, 18-26, 18-25, 18-24, 18-23, 18-22, 18-21, 18-20, 19-30, 19-29, 19-28, 19-27, 19-26, 19-25, 19-24, 19-23, 19-22, 19-21, 19-20, 20-30, 20-29, 20-28, 20-27, 20-26, 20-25, 20-24, 20-23, 20-22, 20-21, 21-30, 21-29, 21-28, 21-27, 21-26, 21-25, 21-24, 21-23, or 21-22 nucleotides. In some embodiments, the region of complementarity comprises from about 18-25, 18-24, 18-23, 18-22, 18-21, 18-20, 19-25, 19-24, 19-23, 19-22, 19-21, 19-20, 20-25, 20-24, 20-23, 20-22, 20-21, 21-25, 21-24, 21-23, 21-22, 22-25, 22-24, 22-23, 23-25, 23-24 or 24-25 nucleotides. In some embodiments, the region of complementarity comprises from about 19-21 (e.g., 19-20) nucleotides. In some embodiments, the region of complementarity comprises or consists of about 15, 16, 17, 18, 19, 20, 21, 22, 23, 24, 25, 26, 27, 28, 29, or 30 nucleotides. In some embodiments, the region of complementarity comprises or consists of about 19, 20, 21, 22, or 23 nucleotides. In some embodiments, the region of complementarity comprises or consists of about 19 nucleotides. In some embodiments, the region of complementarity comprises or consists of about 20 nucleotides. In some embodiments, the region of complementarity comprises or consists of about 21 nucleotides. In some embodiments, the region of complementarity comprises or consists of about 22 nucleotides. In some embodiments, the region of complementarity comprises or consists of about 23 nucleotides. Ranges and lengths intermediate to the above recited ranges and lengths are also contemplated to be part of the disclosure.

[0179] In some embodiments, the target nucleic acid molecule is part (e.g., a contiguous portion) of a larger nucleic acid molecule. For example, in some embodiments, the target nucleic acid molecule is a portion (e.g., a contiguous portion) of a target mRNA (e.g., a CIDEB mRNA). In some embodiments, the target nucleic acid molecule is a contiguous nucleotide sequence of a target mRNA (e.g., a CIDEB mRNA) of sufficient length to allow it to be a substrate for cleavage directed by an RNAi agent (e.g., an RNAi agent described herein, e.g., a dsRNA agent (e.g., described herein)) (i.e., cleavage through a RISC pathway).

[0180] In some embodiments, the target nucleic acid molecule is a target mRNA (e.g., a CIDEB mRNA). In some embodiments, the target nucleic acid molecule is at least a portion (e.g., a portion) of a target mRNA (e.g., a CIDEB mRNA). In some embodiments, the target nucleic acid molecule is at least a portion (e.g., a portion) of an mRNA (e.g., a CIDEB mRNA) formed in the expression of a target gene (e.g., a mammalian, primate, human, non-human primate, mouse, and/or rat gene) (e.g., a CIDEB gene). In some embodiments, the target nucleic acid molecule is at least a portion (e.g., a portion) of a CIDEB (e.g., hCIDEB) mRNA. In some embodiments, the target nucleic acid molecule is at least a portion (e.g., a portion) of an mRNA formed in the expression of a CIDEB (e.g., hCIDEB) gene. In some embodiments, the target nucleic acid molecule comprises at least a portion (e.g., a portion) of the nucleotide sequence set forth in SEQ ID NO: 1 (or a variant or fragment thereof). In some embodiments, the target nucleic acid molecule comprises at least a portion (e.g., a portion) of an mRNA encoding a target protein. In some embodiments, the target nucleic acid molecule comprises at least a portion (e.g., a portion) of an mRNA encoding a CIDEB (e.g., hCIDEB) protein. In some embodiments, the target nucleic acid molecule comprises at least a portion (e.g., a portion) of an mRNA sequence encoding a protein comprising the amino acid sequence set forth in SEQ ID NO: 3 (or a variant or fragment thereof).

[0181] In some embodiments, the target nucleic acid molecule comprises or consists of from about 19-30 nucleotides, e.g., 19-29, 19-28, 19-27, 19-26, 19-25, 19-24, 19-23, 19-22, 19-21, 19-20, 20-30, 20-29, 20-28, 20-27, 20-26, 20-25, 20-24, 20-23, 20-22, 20-21, 21-30, 21-29, 21-28, 21-27, 21-26, 21-25, 21-24, 21-23, 21-22, 22-30, 22-29, 22-28, 22-27, 22-26, 22-25, 22-24, 22-23, 23-30, 23-29, 23-28, 23-27, 23-26, 23-27, 23-26, 23-25, or 23-24 nucleotides. In some embodiments, the target nucleic acid molecule comprises or consists of from about 19-25 nucleotides. In some embodiments, the target nucleic acid molecule comprises or consists of from about 19-23 nucleotides. In some embodiments, the target nucleic acid molecule comprises or consists of from about 21-25 nucleotides. In some embodiments, the target nucleic acid molecule comprises or consists of from about 21-23 nucleotides. In some embodiments, the target nucleic acid molecule comprises or consists of about 19, 18, 20, 21, 22, 23, 24, 25, 26, 27, 28, 29, or 30 nucleotides. In some embodiments, the target nucleic acid molecule comprises or consists of about 19 nucleotides. In some embodiments, the target nucleic acid molecule comprises or consists of about 20 nucleotides. In some embodiments, the target nucleic acid molecule comprises or consists of about 21 nucleotides. In some embodiments, the target nucleic acid molecule comprises or consists of about 23 nucleotides. Ranges and lengths intermediate to the above recited ranges and lengths are also contemplated to be part of the disclosure.

### 4.2.1.2 Overall Length

[0182] In some embodiments, the antisense strand comprises or consists of from about 15-30 nucleotides (e.g., 15-29, 15-28, 15-27, 15-26, 15-25, 15-24, 15-23, 15-22, 15-21, 15-20, 15-19, 15-18, 15-17, 18-30, 18-29, 18-28, 18-27, 18-26, 18-25, 18-24, 18-23, 18-22, 18-21, 18-20, 19-30, 19-29, 19-28, 19-27, 19-26, 19-25, 19-24, 19-23, 19-22, 19-21, 19-20, 20-30, 20-29, 20-28, 20-27, 20-26, 20-25, 20-24, 20-23, 20-22, 20-21, 21-30, 21-29, 21-28, 21-27, 21-26, 21-25, 21-24, 21-23, or 21-22 nucleotides). In some embodiments, the antisense strand comprises or consists of from about 18-25 nucleotides (e.g., 18-24, 18-23, 18-22, 18-21, 18-20, 19-25, 19-24, 19-23, 19-22, 19-21, 19-20, 20-25, 20-24, 20-23, 20-22, 20-21, 21-25, 21-24, 21-23, 21-22, 22-25, 22-24, 22-23, 23-25, 23-24 or 24-25 nucleotides). In some embodiments, the antisense strand comprises or consists of from about 19-25 nucleotide (e.g., 19-20, 19-21, 19-22, 19-23, 19-24, 19-25, 20-21, 20-22, 20-23, 20-24, 20-25, 21-22, 21-23, 21-24, 21-25, 22-23, 22-24, 22-25, 23-24, 23-25, 24-25 nucleotides). In some embodiments, the antisense strand comprises or consists of from about 15-30, 16-30, 17-30, 18-30, 19-30 20-30, 21-30, 22-30, 23-30, 24-30, 25-30, 36-30, 27-30, 28-30-, 29-30, 19-20, 19-21, 19-22, 19-23, 19-24, or 19-25 nucleotides.

[0183] In some embodiments, the antisense strand comprises or consists of not more than about 15, 16, 17, 18, 19, 20, 21, 22, 23, 24, 25, 26, 27, 28, 29, or 30 nucleotides. In some embodiments, the antisense strand comprises or consists of about 15, 16, 17, 18, 19, 20, 21, 22, 23, 24, 25, 26, 27, 28, 29, or 30 nucleotides. In some embodiments, the antisense strand comprises or consists of about 21 nucleotides. In some embodiments, the antisense strand comprises or consists of about 23 nucleotides. Ranges and lengths intermediate to the above recited ranges and lengths are also contemplated to be part of the disclosure.

### 4.2.1.3 Exemplary Antisense Strands

[0184] In some embodiments, the nucleotide sequence of the antisense strand differs by no more than 5 (e.g., 0, 1, 2, 3, 4, or 5) nucleotides from the nucleotide sequence of any one of the antisense strands set forth in Table 2 or Table 3. In some embodiments, the nucleotide sequence of the antisense strand differs by no more than 3 (e.g., 0, 1, 2, or 3) nucleotides from the nucleotide sequence of any one of the antisense strands set forth in Table 2 or Table 3. In some embodiments, the nucleotide sequence of the antisense strand differs by no more than 2 (e.g., 0, 1, or 2) nucleotides from the nucleotide sequence of any one of the antisense strands set forth in Table 2 or Table 3. In some embodiments, the nucleotide sequence of the antisense strand differs by no more than 1 (e.g., 0 or 1) nucleotide from the nucleotide sequence of any one of the antisense strands set forth in Table 2 or Table 3.

[0185] In some embodiments, the nucleotide sequence of the antisense strand comprises the nucleotide sequence of any one of the antisense strands set forth in Table 2 or Table 3 differing by no more than 5 (e.g., 0, 1, 2, 3, 4, or 5) nucleotides from the antisense strand set forth in Table 2 or Table 3. In some embodiments, the nucleotide sequence of the antisense strand comprises the nucleotide sequence of any one of the antisense strands set forth in Table 2 or Table 3 differing by no more than 3 (e.g., 0, 1, 2, or 3) nucleotides from the antisense strand set forth in Table 2 or Table 3. In some embodiments, the nucleotide sequence of the antisense strand comprises the nucleotide sequence of any one of the antisense strands set forth in Table 2 or Table 3 differing by no more than 2 (e.g., 0, 1, or 2) nucleotides from the antisense strand set forth in Table 2 or Table 3. In some embodiments, the nucleotide sequence of the antisense strand comprises the nucleotide sequence of any one of the antisense strands set forth in Table 2 or Table 3 differing by no more than 1 (e.g., 0 or 1) nucleotide from the antisense strand set forth in Table 2 or Table 3.

[0186] In some embodiments, the nucleotide sequence of the antisense strand is at least 85%, 86%, 87%, 88%, 89%, 90%, 91%, 92%, 93%, 94%, 95%, 96%, 97%, 98%, 99% or 100% identical to the nucleotide sequence of any one of the antisense strands set forth in Table 2 or Table 3. In some embodiments, the nucleotide sequence of the antisense strand is at least 90%, 91%, 92%, 93%, 94%, 95%, 96%, 97%, 98%, 99% or 100% identical to the nucleotide sequence of any one of the antisense strands set forth in Table 2 or Table 3. In some embodiments, the nucleotide sequence of the antisense strand is at least 95%, 96%, 97%, 98%, 99% or 100% identical to the nucleotide sequence of any one of the antisense strands set forth in Table 2 or Table 3. In some embodiments, the nucleotide sequence of the antisense strand is at least 96%, 97%, 98%, 99% or 100% identical to the nucleotide sequence of any one of the antisense strands set forth in Table 2 or Table 3. In some embodiments, the nucleotide sequence of the antisense strand is at least 97%, identical to the nucleotide sequence of any one of the antisense strands set forth in Table 2 or Table 3. In some embodiments, the nucleotide sequence of the antisense strand is at least 98% identical to the nucleotide sequence of any one of the antisense strands set forth in Table 2 or Table 3. In some embodiments, the nucleotide sequence of the antisense strand is at least 99% identical to the nucleotide sequence of any one of the antisense strands set forth in Table 2 or Table 3. In some embodiments, the nucleotide sequence of the antisense strand is 100% identical to the nucleotide sequence of any one of the antisense strands set forth in Table 2 or Table 3.

[0187] In some embodiments, the nucleotide sequence of the antisense strand comprises the nucleotide sequence of any one of the antisense strands set forth in Table 2 or Table 3. In some embodiments, the nucleotide sequence of the antisense strand consists of the nucleotide sequence of any one of the antisense strands set forth in Table 2 or Table 3.

[0188] Table 2 or Table 3 further identifies the target nucleic acid molecule within the cited reference CIDEB mRNA transcript (SEQ ID NO: 1) targeted by each of the antisense strands. As such, the disclosure further provides antisense strands wherein the nucleotide sequence of the antisense strand differs by no more than 5 (e.g., 0, 1, 2, 3, 4, or 5 (e.g., no more than 3 (e.g., 0, 1, 2, or 3))) nucleotides from the nucleotide sequence of any one of the antisense strands set forth in Table 2 or Table 3 and further comprising additional nucleotide sequences (e.g., comprising from about 1-10, 1-9, 1-8, 1-7, 1-6, 1-5, 1-4, 1-3, or 1-2 nucleotides) at least partially complementary to the region contiguous (e.g., either at the 3′ end, the 5′ end, or both the 3′ and 5′ end) of the CIDEB mRNA transcript targeted by the select antisense strand.

[0189] In some embodiments, the antisense strand comprises at least 15 (e.g., 15, 16, 17, 18, 19, 20, 21, 22, 23, 24, 25, 26, 27, 28, 29, 30 (e.g., 19, 20, 21, 22, 23 (e.g., 23))) contiguous nucleotides differing by no more than 3 (e.g., 0, 1, 2, or 3) nucleotides from the nucleotide sequence of any one of the antisense strands set forth in Table 2 or Table 3. In some embodiments, the antisense strand comprises at least 19 (e.g., 20, 21, 22, 23, 24, 25, 26, 27, 28, 29, 30 (e.g., 19, 20, 21, 22, 23 (e.g., 23))) contiguous nucleotides differing by no more than 3 (e.g., 0, 1, 2, or 3) nucleotides from the nucleotide sequence of any one of the antisense strands set forth in Table 2 or Table 3. In some embodiments, the antisense strand comprises at least 21 (e.g., 22, 23, 24, 25, 26, 27, 28, 29, 30 (e.g., 21, 22, 23 (e.g., 23))) contiguous nucleotides differing by no more than 3 (e.g., 0, 1, 2, or 3) nucleotides from the nucleotide sequence of any one of the antisense strands set forth in Table 2 or Table 3. In some embodiments, the antisense strand comprises at least 23 (e.g., 24, 25, 26, 27, 28, 29, 30) contiguous nucleotides differing by no more than 3 (e.g., 0, 1, 2, or 3) nucleotides from the nucleotide sequence of any one of the antisense strands set forth in Table 2 or Table 3.

[0190] In some embodiments, the antisense strand comprises from about 15-23 (e.g., 15-22, 15-21, 15-20, 15-19, 15-18, 15-17, 15-16, 16-22, 16-20, 16-19, 16-18, 16-17, 17-23, 17-22, 17-21, 17-20, 17-19, 17-18, 18-23, 18-22, 18-21, 18-20, 18-19, 19-23, 19-22, 19-21, 19-20, 20-23, 20-22, 20-21, 21-23, 21-22, 22-23) contiguous nucleotides differing by no more than 3 (e.g., 0, 1, 2, or 3) nucleotides from the nucleotide sequence of any one of the antisense strands set forth in Table 2 or Table 3. In some embodiments, the antisense strand comprises from about 19-23 (e.g., 19-22, 19-21, 19-20, 20-23, 20-22, 20-21, 21-23, 21-22, 22-23) contiguous nucleotides differing by no more than 3 (e.g., 0, 1, 2, or 3) nucleotides from the nucleotide sequence of any one of the antisense strands set forth in Table 2 or Table 3. In some embodiments, the antisense strand comprises from about 21-23 (e.g., 21-22, 22-23) contiguous nucleotides differing by no more than 3 (e.g., 0, 1, 2, or 3) nucleotides from the nucleotide sequence of any one of the antisense strands set forth in Table 2 or Table 3.

[0191] In some embodiments, the nucleotide sequence of the antisense strand comprises the nucleotide sequence of any one of the antisense strands set forth in Table 2 or Table 3 differing by no more than 3 (e.g., 0, 1, 2, or 3) nucleotides from the antisense strand set forth in Table 2 or Table 3. In some embodiments, the nucleotide sequence of the antisense strand comprises the nucleotide sequence of any one of the antisense strands set forth in Table 2 or Table 3.

[0192] Table 2 or Table 3 further identifies the target nucleic acid molecule within the cited reference CIDEB mRNA transcript (SEQ ID NO: 1) targeted by each of the antisense strands. As such, the disclosure further provides antisense strands comprising at least 15 (e.g., 15, 16, 17, 18, 19, 20, 21, 22, 23, 24, 25, 26, 27, 28, 29, 30 (e.g., 19, 20, 21, 22, 23 (e.g., 23))) contiguous nucleotides differing by no more than 3 (e.g., 0, 1, 2, or 3) nucleotides from the nucleotide sequence of any one of the antisense strands set forth in Table 2 or Table 3 and further comprising additional nucleotide sequences (e.g., comprising from about 1-10, 1-9, 1-8, 1-7, 1-6, 1-5, 1-4, 1-3, or 1-2 nucleotides) at least partially complementary to the region contiguous (e.g., either at the 3′ end, the 5′ end, or both the 3′ and 5′ end) of the CIDEB mRNA transcript targeted by the select antisense strand.

[0193] In some embodiments, the nucleotide sequence of the antisense strand differs by no more than 5 (e.g., 0, 1, 2, 3, 4, or 5) nucleotides from the nucleotide sequence set forth in any one of SEQ ID NOS: 187-369, 602-657, 893-1131, or 1188-1191. In some embodiments, the nucleotide sequence of the antisense strand differs by no more than 3 (e.g., 0, 1, 2, or 3) nucleotides from the nucleotide sequence set forth in any one of SEQ ID NOS: 187-369, 602-657, 893-1131, or 1188-1191. In some embodiments, the nucleotide sequence of the antisense strand differs by no more than 2 (e.g., 0, 1, or 2) nucleotides from the nucleotide sequence set forth in any one of SEQ ID NOS: 187-369, 602-657, 893-1131, or 1188-1191. In some embodiments, the nucleotide sequence of the antisense strand differs by no more than 1 (e.g., 0 or 1) nucleotide from the nucleotide sequence set forth in any one of SEQ ID NOS: 187-369, 602-657, 893-1131, or 1188-1191.

[0194] In some embodiments, the nucleotide sequence of the antisense strand comprises the nucleotide sequence set forth in any one of SEQ ID NOS: 187-369, 602-657, 893-1131, or 1188-1191 differing by no more than 5 (e.g., 0, 1, 2, 3, 4, or 5) nucleotides from the nucleotide sequence set forth in any one of SEQ ID NOS: 187-369, 602-657, 893-1131, or 1188-1191. In some embodiments, the nucleotide sequence of the antisense strand comprises the nucleotide sequence set forth in any one of SEQ ID NOS: 187-369, 602-657, 893-1131, or 1188-1191 differing by no more than 3 (e.g., 0, 1, 2, or 3) nucleotides from the nucleotide sequence set forth in any one of SEQ ID NOS: 187-369, 602-657, 893-1131, or 1188-1191. In some embodiments, the nucleotide sequence of the antisense strand comprises the nucleotide sequence set forth in any one of SEQ ID NOS: 187-369, 602-657, 893-1131, or 1188-1191 differing by no more than 2 (e.g., 0, 1, or 2) nucleotides from the nucleotide sequence set forth in any one of SEQ ID NOS: 187-369, 602-657, 893-1131, or 1188-1191. In some embodiments, the nucleotide sequence of the antisense strand comprises the nucleotide sequence set forth in any one of SEQ ID NOS: 187-369, 602-657, 893-1131, or 1188-1191 differing by no more than 1 (e.g., 0 or 1) nucleotide from the nucleotide sequence set forth in any one of SEQ ID NOS: 187-369, 602-657, 893-1131, or 1188-1191.

[0195] In some embodiments, the nucleotide sequence of the antisense strand is at least 85%, 86%, 87%, 88%, 89%, 90%, 91%, 92%, 93%, 94%, 95%, 96%, 97%, 98%, 99% or 100% identical to the nucleotide sequence set forth in any one of SEQ ID NOS: 187-369, 602-657, 893-1131, or 1188-1191. In some embodiments, the nucleotide sequence of the antisense strand is at least 90%, 91%, 92%, 93%, 94%, 95%, 96%, 97%, 98%, 99% or 100% identical to the nucleotide sequence set forth in any one of SEQ ID NOS: 187-369, 602-657, 893-1131, or 1188-1191. In some embodiments, the nucleotide sequence of the antisense strand is at least 95%, 96%, 97%, 98%, 99% or 100% identical to the nucleotide sequence set forth in any one of SEQ ID NOS: 187-369, 602-657, 893-1131, or 1188-1191. In some embodiments, the nucleotide sequence of the antisense strand is at least 96%, 97%, 98%, 99% or 100% identical to the nucleotide sequence set forth in any one of SEQ ID NOS: 187-369, 602-657, 893-1131, or 1188-1191. In some embodiments, the nucleotide sequence of the antisense strand is at least 97%, identical to the nucleotide sequence set forth in any one of SEQ ID NOS: 187-369, 602-657, 893-1131, or 1188-1191. In some embodiments, the nucleotide sequence of the antisense strand is at least 98% identical to the nucleotide sequence set forth in any one of SEQ ID NOS: 187-369, 602-657, 893-1131, or 1188-1191. In some embodiments, the nucleotide sequence of the antisense strand is at least 99% identical to the nucleotide sequence set forth in any one of SEQ ID NOS: 187-369, 602-657, 893-1131, or 1188-1191. In some embodiments, the nucleotide sequence of the antisense strand is 100% identical to the nucleotide sequence set forth in any one of SEQ ID NOS: 187-369, 602-657, 893-1131, or 1188-1191.

[0196] In some embodiments, the nucleotide sequence of the antisense strand comprises the nucleotide sequence set forth in any one of SEQ ID NOS: 187-369, 602-657, 893-1131, or 1188-1191. In some embodiments, the nucleotide sequence of the antisense strand consists of the nucleotide sequence set forth in any one of SEQ ID NOS: 187-369, 602-657, 893-1131, or 1188-1191.

[0197] Table 2 or Table 3 further identifies the target nucleic acid molecule within the cited reference CIDEB mRNA transcript (SEQ ID NO: 1) targeted by each of the antisense strands. As such, the disclosure further provides antisense strands wherein the nucleotide sequence of the antisense strand differs by no more than 5 (e.g., 0, 1, 2, 3, 4, or 5 (e.g., no more than 3 (e.g., 0, 1, 2, or 3))) nucleotides from the nucleotide sequence set forth in any one of SEQ ID NOS: 187-369, 602-657, 893-1131, or 1188-1191 and further comprising additional nucleotide sequences (e.g., comprising from about 1-10, 1-9, 1-8, 1-7, 1-6, 1-5, 1-4, 1-3, or 1-2 nucleotides) at least partially complementary to the region contiguous (e.g., either at the 3′ end, the 5′ end, or both the 3′ and 5′ end) of the CIDEB mRNA transcript targeted by the select antisense strand.

[0198] In some embodiments, the antisense strand comprises at least 15 (e.g., 15, 16, 17, 18, 19, 20, 21, 22, 23, 24, 25, 26, 27, 28, 29, 30 (e.g., 19, 20, 21, 22, 23 (e.g., 23))) contiguous nucleotides differing by no more than 3 (e.g., 0, 1, 2, or 3) nucleotides from the nucleotide sequence set forth in any one of SEQ ID NOS: 187-369, 602-657, 893-1131, or 1188-1191. In some embodiments, the antisense strand comprises at least 19 (e.g., 20, 21, 22, 23, 24, 25, 26, 27, 28, 29, 30 (e.g., 19, 20, 21, 22, 23 (e.g., 23))) contiguous nucleotides differing by no more than 3 (e.g., 0, 1, 2, or 3) nucleotides from the nucleotide sequence of any one of the antisense strands set forth in any one of SEQ ID NOS: 187-369, 602-657, 893-1131, or 1188-1191. In some embodiments, the antisense strand comprises at least 21 (e.g., 22, 23, 24, 25, 26, 27, 28, 29, 30 (e.g., 21, 22, 23 (e.g., 23))) contiguous nucleotides differing by no more than 3 (e.g., 0, 1, 2, or 3) nucleotides from the nucleotide sequence set forth in any one of SEQ ID NOS: 187-369, 602-657, 893-1131, or 1188-1191. In some embodiments, the antisense strand comprises at least 23 (e.g., 24, 25, 26, 27, 28, 29, 30) contiguous nucleotides differing by no more than 3 (e.g., 0, 1, 2, or 3) nucleotides from the nucleotide sequence set forth in any one of SEQ ID NOS: 187-369, 602-657, 893-1131, or 1188-1191.

[0199] In some embodiments, the antisense strand comprises from about 15-23 (e.g., 15-22, 15-21, 15-20, 15-19, 15-18, 15-17, 15-16, 16-22, 16-20, 16-19, 16-18, 16-17, 17-23, 17-22, 17-21, 17-20, 17-19, 17-18, 18-23, 18-22, 18-21, 18-20, 18-19, 19-23, 19-22, 19-21, 19-20, 20-23, 20-22, 20-21, 21-23, 21-22, 22-23) contiguous nucleotides differing by no more than 3 (e.g., 0, 1, 2, or 3) nucleotides from the nucleotide sequence set forth in any one of SEQ ID NOS: 187-369, 602-657, 893-1131, or 1188-1191. In some embodiments, the antisense strand comprises from about 19-23 (e.g., 19-22, 19-21, 19-20, 20-23, 20-22, 20-21, 21-23, 21-22, 22-23) contiguous nucleotides differing by no more than 3 (e.g., 0, 1, 2, or 3) nucleotides from the nucleotide sequence set forth in any one of SEQ ID NOS: 187-369, 602-657, 893-1131, or 1188-1191. In some embodiments, the antisense strand comprises from about 21-23 (e.g., 21-22, 22-23) contiguous nucleotides differing by no more than 3 (e.g., 0, 1, 2, or 3) nucleotides from the nucleotide sequence set forth in any one of SEQ ID NOS: 187-369, 602-657, 893-1131, or 1188-1191.

[0200] In some embodiments, the nucleotide sequence of the antisense strand comprises the nucleotide sequence set forth in any one of SEQ ID NOS: 187-369, 602-657, 893-1131, or 1188-1191 differing by no more than 3 (e.g., 0, 1, 2, or 3) nucleotides from the nucleotide sequence set forth in any one of SEQ ID NOS: 187-369, 602-657, 893-1131, or 1188-1191. In some embodiments, the nucleotide sequence of the antisense strand comprises the nucleotide sequence set forth in any one of SEQ ID NOS: 187-369, 602-657, 893-1131, or 1188-1191.

[0201] As described above, Table 2 or Table 3 further identifies the target nucleic acid molecule within the cited reference CIDEB mRNA transcript (SEQ ID NO: 1) targeted by each of the antisense strands. The disclosure further provides antisense strands comprising at least 15 (e.g., 15, 16, 17, 18, 19, 20, 21, 22, 23, 24, 25, 26, 27, 28, 29, 30 (e.g., 19, 20, 21, 22, 23 (e.g., 23))) contiguous nucleotides differing by no more than 3 (e.g., 0, 1, 2, or 3) nucleotides from the nucleotide sequence set forth in any one of SEQ ID NOS: 187-369, 602-657, 893-1131, or 1188-1191 and further comprising additional nucleotide sequences (e.g., comprising from about 1-10, 1-9, 1-8, 1-7, 1-6, 1-5, 1-4, 1-3, or 1-2 nucleotides) at least partially complementary to the region contiguous (e.g., either at the 3′ end, the 5′ end, or both the 3′ and 5′ end) of the CIDEB mRNA transcript targeted by the select antisense strand.

[0202] In some embodiments, the nucleotide sequence of the antisense strand differs by no more than 5 (e.g., 0, 1, 2, 3, 4, or 5) nucleotides from the nucleotide sequence set forth in any one of SEQ ID NOS: 315, 321, 355, or 356. In some embodiments, the nucleotide sequence of the antisense strand differs by no more than 3 (e.g., 0, 1, 2, or 3) nucleotides from the nucleotide sequence set forth in any one of SEQ ID NOS: 315, 321, 355, or 356. In some embodiments, the nucleotide sequence of the antisense strand differs by no more than 2 (e.g., 0, 1, or 2) nucleotides from the nucleotide sequence set forth in any one of SEQ ID NOS: 315, 321, 355, or 356. In some embodiments, the nucleotide sequence of the antisense strand differs by no more than 1 (e.g., 0 or 1) nucleotide from the nucleotide sequence set forth in any one of SEQ ID NOS: 315, 321, 355, or 356.

[0203] In some embodiments, the nucleotide sequence of the antisense strand comprises the nucleotide sequence set forth in any one of SEQ ID NOS: 315, 321, 355, or 356 differing by no more than 5 (e.g., 0, 1, 2, 3, 4, or 5) nucleotides from the nucleotide sequence set forth in any one of SEQ ID NOS: 315, 321, 355, 356. In some embodiments, the nucleotide sequence of the antisense strand comprises the nucleotide sequence set forth in any one of SEQ ID NOS: 315, 321, 355, or 356 differing by no more than 3 (e.g., 0, 1, 2, or 3) nucleotides from the nucleotide sequence set forth in any one of SEQ ID NOS: 315, 321, 355, 356. In some embodiments, the nucleotide sequence of the antisense strand comprises the nucleotide sequence set forth in any one of SEQ ID NOS: 315, 321, 355, or 356 differing by no more than 2 (e.g., 0, 1, or 2) nucleotides from the nucleotide sequence set forth in any one of SEQ ID NOS: 315, 321, 355, 356. In some embodiments, the nucleotide sequence of the antisense strand comprises the nucleotide sequence set forth in any one of SEQ ID NOS: 315, 321, 355, or 356 differing by no more than 1 (e.g., 0 or 1) nucleotide from the nucleotide sequence set forth in any one of SEQ ID NOS: 315, 321, 355, 356.

[0204] In some embodiments, the nucleotide sequence of the antisense strand is at least 85%, 86%, 87%, 88%, 89%, 90%, 91%, 92%, 93%, 94%, 95%, 96%, 97%, 98%, 99% or 100% identical to the nucleotide sequence set forth in any one of SEQ ID NOS: 315, 321, 355, or 356. In some embodiments, the nucleotide sequence of the antisense strand is at least 90%, 91%, 92%, 93%, 94%, 95%, 96%, 97%, 98%, 99% or 100% identical to the nucleotide sequence set forth in any one of SEQ ID NOS: 315, 321, 355, or 356. In some embodiments, the nucleotide sequence of the antisense strand is at least 95%, 96%, 97%, 98%, 99% or 100% identical to the nucleotide sequence set forth in any one of SEQ ID NOS: 315, 321, 355, or 356. In some embodiments, the nucleotide sequence of the antisense strand is at least 96%, 97%, 98%, 99% or 100% identical to the nucleotide sequence set forth in any one of SEQ ID NOS: 315, 321, 355, or 356. In some embodiments, the nucleotide sequence of the antisense strand is at least 97%, identical to the nucleotide sequence set forth in any one of SEQ ID NOS: 315, 321, 355, or 356. In some embodiments, the nucleotide sequence of the antisense strand is at least 98% identical to the nucleotide sequence set forth in any one of SEQ ID NOS: 315, 321, 355, or 356. In some embodiments, the nucleotide sequence of the antisense strand is at least 99% identical to the nucleotide sequence set forth in any one of SEQ ID NOS: 315, 321, 355, or 356. In some embodiments, the nucleotide sequence of the antisense strand is 100% identical to the nucleotide sequence set forth in any one of SEQ ID NOS: 315, 321, 355, or 356.

[0205] In some embodiments, the nucleotide sequence of the antisense strand comprises the nucleotide sequence set forth in any one of SEQ ID NOS: 315, 321, 355, or 356. In some embodiments, the nucleotide sequence of the antisense strand consists of the nucleotide sequence set forth in any one of SEQ ID NOS: 315, 321, 355, or 356.

[0206] Table 2 or Table 3 further identifies the target nucleic acid molecule within the cited reference CIDEB mRNA transcript (SEQ ID NO: 1) targeted by each of the antisense strands. As such, the disclosure further provides antisense strands wherein the nucleotide sequence of the antisense strand differs by no more than 5 (e.g., 0, 1, 2, 3, 4, or 5 (e.g., no more than 3 (e.g., 0, 1, 2, or 3))) nucleotides from the nucleotide sequence set forth in any one of SEQ ID NOS: 315, 321, 355, or 356 and further comprising additional nucleotide sequences (e.g., comprising from about 1-10, 1-9, 1-8, 1-7, 1-6, 1-5, 1-4, 1-3, or 1-2 nucleotides) at least partially complementary to the region contiguous (e.g., either at the 3′ end, the 5′ end, or both the 3′ and 5′ end) of the CIDEB mRNA transcript targeted by the select antisense strand.

[0207] In some embodiments, the nucleotide sequence of the antisense strand differs by no more than 5 (e.g., 0, 1, 2, 3, 4, or 5) nucleotides from the nucleotide sequence set forth in any one of SEQ ID NOS: 1062, 1188, 1189, 1190, or 1191. In some embodiments, the nucleotide sequence of the antisense strand differs by no more than 3 (e.g., 0, 1, 2, or 3) nucleotides from the nucleotide sequence set forth in any one of SEQ ID NOS: 1062, 1188, 1189, 1190, or 1191. In some embodiments, the nucleotide sequence of the antisense strand differs by no more than 2 (e.g., 0, 1, or 2) nucleotides from the nucleotide sequence set forth in any one of SEQ ID NOS: 1062, 1188, 1189, 1190, or 1191. In some embodiments, the nucleotide sequence of the antisense strand differs by no more than 1 (e.g., 0 or 1) nucleotide from the nucleotide sequence set forth in any one of SEQ ID NOS: 1062, 1188, 1189, 1190, or 1191.

[0208] In some embodiments, the nucleotide sequence of the antisense strand comprises the nucleotide sequence set forth in any one of SEQ ID NOS: 1062, 1188, 1189, 1190, or 1191 differing by no more than 5 (e.g., 0, 1, 2, 3, 4, or 5) nucleotides from the nucleotide sequence set forth in any one of SEQ ID NOS: 315, 321, 355, 356. In some embodiments, the nucleotide sequence of the antisense strand comprises the nucleotide sequence set forth in any one of SEQ ID NOS: 1062, 1188, 1189, 1190, or 1191 differing by no more than 3 (e.g., 0, 1, 2, or 3) nucleotides from the nucleotide sequence set forth in any one of SEQ ID NOS: 1062, 1188, 1189, 1190, or 1191. In some embodiments, the nucleotide sequence of the antisense strand comprises the nucleotide sequence set forth in any one of SEQ ID NOS: 1062, 1188, 1189, 1190, or 1191 differing by no more than 2 (e.g., 0, 1, or 2) nucleotides from the nucleotide sequence set forth in any one of SEQ ID NOS: 1062, 1188, 1189, 1190, or 1191. In some embodiments, the nucleotide sequence of the antisense strand comprises the nucleotide sequence set forth in any one of SEQ ID NOS: 1062, 1188, 1189, 1190, or 1191 differing by no more than 1 (e.g., 0 or 1) nucleotide from the nucleotide sequence set forth in any one of SEQ ID NOS: 1062, 1188, 1189, 1190, or 1191.

[0209] In some embodiments, the nucleotide sequence of the antisense strand is at least 85%, 86%, 87%, 88%, 89%, 90%, 91%, 92%, 93%, 94%, 95%, 96%, 97%, 98%, 99% or 100% identical to the nucleotide sequence set forth in any one of SEQ ID NOS: 1062, 1188, 1189, 1190, or 1191. In some embodiments, the nucleotide sequence of the antisense strand is at least 90%, 91%, 92%, 93%, 94%, 95%, 96%, 97%, 98%, 99% or 100% identical to the nucleotide sequence set forth in any one of SEQ ID NOS: 1062, 1188, 1189, 1190, or 1191. In some embodiments, the nucleotide sequence of the antisense strand is at least 95%, 96%, 97%, 98%, 99% or 100% identical to the nucleotide sequence set forth in any one of SEQ ID NOS: 1062, 1188, 1189, 1190, or 1191. In some embodiments, the nucleotide sequence of the antisense strand is at least 96%, 97%, 98%, 99% or 100% identical to the nucleotide sequence set forth in any one of SEQ ID NOS: 1062, 1188, 1189, 1190, or 1191. In some embodiments, the nucleotide sequence of the antisense strand is at least 97%, identical to the nucleotide sequence set forth in any one of SEQ ID NOS: 1062, 1188, 1189, 1190, or 1191. In some embodiments, the nucleotide sequence of the antisense strand is at least 98% identical to the nucleotide sequence set forth in any one of SEQ ID NOS: 1062, 1188, 1189, 1190, or 1191. In some embodiments, the nucleotide sequence of the antisense strand is at least 99% identical to the nucleotide sequence set forth in any one of SEQ ID NOS: 1062, 1188, 1189, 1190, or 1191. In some embodiments, the nucleotide sequence of the antisense strand is 100% identical to the nucleotide sequence set forth in any one of SEQ ID NOS: 1062, 1188, 1189, 1190, or 1191.

[0210] In some embodiments, the nucleotide sequence of the antisense strand comprises the nucleotide sequence set forth in any one of SEQ ID NOS: 1062, 1188, 1189, 1190, or 1191. In some embodiments, the nucleotide sequence of the antisense strand consists of the nucleotide sequence set forth in any one of SEQ ID NOS: 1062, 1188, 1189, 1190, or 1191.

[0211] Table 2 or Table 3 further identifies the target nucleic acid molecule within the cited reference CIDEB mRNA transcript (SEQ ID NO: 1) targeted by each of the antisense strands. As such, the disclosure further provides antisense strands wherein the nucleotide sequence of the antisense strand differs by no more than 5 (e.g., 0, 1, 2, 3, 4, or 5 (e.g., no more than 3 (e.g., 0, 1, 2, or 3))) nucleotides from the nucleotide sequence set forth in any one of SEQ ID NOS: 1062, 1188, 1189, 1190, or 1191 and further comprising additional nucleotide sequences (e.g., comprising from about 1-10, 1-9, 1-8, 1-7, 1-6, 1-5, 1-4, 1-3, or 1-2 nucleotides) at least partially complementary to the region contiguous (e.g., either at the 3′ end, the 5′ end, or both the 3′ and 5′ end) of the CIDEB mRNA transcript targeted by the select antisense strand.

[0212] In some embodiments, the nucleotide sequence of the antisense strand differs by no more than 5 (e.g., 0, 1, 2, 3, 4, or 5) nucleotides from the nucleotide sequence set forth in SEQ ID NO: 315. In some embodiments, the nucleotide sequence of the antisense strand differs by no more than 3 (e.g., 0, 1, 2, or 3) nucleotides from the nucleotide sequence set forth in SEQ ID NO: 315. In some embodiments, the nucleotide sequence of the antisense strand differs by no more than 2 (e.g., 0, 1, or 2) nucleotides from the nucleotide sequence set forth in SEQ ID NO: 315. In some embodiments, the nucleotide sequence of the antisense strand differs by no more than 1 (e.g., 0 or 1) nucleotide from the nucleotide sequence set forth in SEQ ID NO: 315.

[0213] In some embodiments, the nucleotide sequence of the antisense strand comprises the nucleotide sequence set forth in SEQ ID NO: 315 differing by no more than 5 (e.g., 0, 1, 2, 3, 4, or 5) nucleotides from the nucleotide sequence set forth in SEQ ID NO: 315. In some embodiments, the nucleotide sequence of the antisense strand comprises the nucleotide sequence set forth in SEQ ID NO: 315 differing by no more than 3 (e.g., 0, 1, 2, or 3) nucleotides from the nucleotide sequence set forth in SEQ ID NO: 315. In some embodiments, the nucleotide sequence of the antisense strand comprises the nucleotide sequence set forth in SEQ ID NO: 315 differing by no more than 2 (e.g., 0, 1, or 2) nucleotides from the nucleotide sequence set forth in SEQ ID NO: 315. In some embodiments, the nucleotide sequence of the antisense strand comprises the nucleotide sequence set forth in SEQ ID NO: 315 differing by no more than 1 (e.g., 0 or 1) nucleotide from nucleotide sequence set forth in SEQ ID NO: 315.

[0214] In some embodiments, the nucleotide sequence of the antisense strand is at least 85%, 86%, 87%, 88%, 89%, 90%, 91%, 92%, 93%, 94%, 95%, 96%, 97%, 98%, 99% or 100% identical to the nucleotide sequence set forth in SEQ ID NO: 315. In some embodiments, the nucleotide sequence of the antisense strand is at least 90%, 91%, 92%, 93%, 94%, 95%, 96%, 97%, 98%, 99% or 100% identical to the nucleotide sequence set forth in SEQ ID NO: 315. In some embodiments, the nucleotide sequence of the antisense strand is at least 95%, 96%, 97%, 98%, 99% or 100% identical to the nucleotide sequence set forth in SEQ ID NO: 315. In some embodiments, the nucleotide sequence of the antisense strand is at least 96%, 97%, 98%, 99% or 100% identical to the nucleotide sequence set forth in SEQ ID NO: 315. In some embodiments, the nucleotide sequence of the antisense strand is at least 97%, identical to the nucleotide sequence set forth in SEQ ID NO: 315. In some embodiments, the nucleotide sequence of the antisense strand is at least 98% identical to the nucleotide sequence set forth in SEQ ID NO: 315. In some embodiments, the nucleotide sequence of the antisense strand is at least 99% identical to the nucleotide sequence set forth in SEQ ID NO: 315. In some embodiments, the nucleotide sequence of the antisense strand is 100% identical to the nucleotide sequence set forth in SEQ ID NO: 315.

[0215] In some embodiments, the nucleotide sequence of the antisense strand comprises the nucleotide sequence set forth in SEQ ID NO: 315. In some embodiments, the nucleotide sequence of the antisense strand consists of the nucleotide sequence set forth in SEQ ID NO: 315.

[0216] Table 2 or Table 3 further identifies the target nucleic acid molecule within the cited reference CIDEB mRNA transcript (SEQ ID NO: 1) targeted by each of the antisense strands. As such, the disclosure further provides an antisense strand wherein the nucleotide sequence of the antisense strand differs by no more than 5 (e.g., 0, 1, 2, 3, 4, or 5 (e.g., no more than 3 (e.g., 0, 1, 2, or 3))) nucleotides from the nucleotide sequence set forth in SEQ ID NO: 315 and further comprising additional nucleotide sequences (e.g., comprising from about 1-10, 1-9, 1-8, 1-7, 1-6, 1-5, 1-4, 1-3, or 1-2 nucleotides) at least partially complementary to the region contiguous (e.g., either at the 3′ end, the 5′ end, or both the 3′ and 5′ end) of the CIDEB mRNA transcript targeted by the select antisense strand.

[0217] In some embodiments, the antisense strand comprises at least 15 (e.g., 15, 16, 17, 18, 19, 20, 21, 22, 23, 24, 25, 26, 27, 28, 29, 30 (e.g., 19, 20, 21, 22, 23 (e.g., 23))) contiguous nucleotides differing by no more than 3 (e.g., 0, 1, 2, or 3) nucleotides from the nucleotide sequence set forth in SEQ ID NO: 315. In some embodiments, the antisense strand comprises at least 19 (e.g., 20, 21, 22, 23, 24, 25, 26, 27, 28, 29, 30 (e.g., 19, 20, 21, 22, 23 (e.g., 23))) contiguous nucleotides differing by no more than 3 (e.g., 0, 1, 2, or 3) nucleotides from the nucleotide sequence of any one of the antisense strands set forth in SEQ ID NO: 315. In some embodiments, the antisense strand comprises at least 21 (e.g., 22, 23, 24, 25, 26, 27, 28, 29, 30 (e.g., 21, 22, 23 (e.g., 23))) contiguous nucleotides differing by no more than 3 (e.g., 0, 1, 2, or 3) nucleotides from the nucleotide sequence set forth in SEQ ID NO: 315. In some embodiments, the antisense strand comprises at least 23 (e.g., 24, 25, 26, 27, 28, 29, 30) contiguous nucleotides differing by no more than 3 (e.g., 0, 1, 2, or 3) nucleotides from the nucleotide sequence set forth in SEQ ID NO: 315.

[0218] In some embodiments, the antisense strand comprises from about 15-23 (e.g., 15-22, 15-21, 15-20, 15-19, 15-18, 15-17, 15-16, 16-22, 16-20, 16-19, 16-18, 16-17, 17-23, 17-22, 17-21, 17-20, 17-19, 17-18, 18-23, 18-22, 18-21, 18-20, 18-19, 19-23, 19-22, 19-21, 19-20, 20-23, 20-22, 20-21, 21-23, 21-22, 22-23) contiguous nucleotides differing by no more than 3 (e.g., 0, 1, 2, or 3) nucleotides from the nucleotide sequence set forth in SEQ ID NO: 315. In some embodiments, the antisense strand comprises from about 19-23 (e.g., 19-22, 19-21, 19-20, 20-23, 20-22, 20-21, 21-23, 21-22, 22-23) contiguous nucleotides differing by no more than 3 (e.g., 0, 1, 2, or 3) nucleotides from the nucleotide sequence set forth in SEQ ID NO: 315. In some embodiments, the antisense strand comprises from about 21-23 (e.g., 21-22, 22-23) contiguous nucleotides differing by no more than 3 (e.g., 0, 1, 2, or 3) nucleotides from the nucleotide sequence set forth in SEQ ID NO: 315.

[0219] In some embodiments, the nucleotide sequence of the antisense strand comprises the nucleotide sequence set forth in SEQ ID NO: 315 differing by no more than 3 (e.g., 0, 1, 2, or 3) nucleotides from the nucleotide sequence set forth in any one of SEQ ID NOS: 315. In some embodiments, the nucleotide sequence of the antisense strand comprises the nucleotide sequence set forth in SEQ ID NO: 315.

[0220] As described above, Table 2 or Table 3 further identifies the target nucleic acid molecule within the cited reference CIDEB mRNA transcript (SEQ ID NO: 1) targeted by each of the antisense strands. The disclosure further provides antisense strands comprising at least 15 (e.g., 15, 16, 17, 18, 19, 20, 21, 22, 23, 24, 25, 26, 27, 28, 29, 30 (e.g., 19, 20, 21, 22, 23 (e.g., 23))) contiguous nucleotides differing by no more than 3 (e.g., 0, 1, 2, or 3) nucleotides from the nucleotide sequence set forth in SEQ ID NO: 315 and further comprising additional nucleotide sequences (e.g., comprising from about 1-10, 1-9, 1-8, 1-7, 1-6, 1-5, 1-4, 1-3, or 1-2 nucleotides) at least partially complementary to the region contiguous (e.g., either at the 3′ end, the 5′ end, or both the 3′ and 5′ end) of the CIDEB mRNA transcript targeted by the select antisense strand.

[0221] In some embodiments, the nucleotide sequence of the antisense strand differs by no more than 5 (e.g., 0, 1, 2, 3, 4, or 5) nucleotides from the nucleotide sequence set forth in SEQ ID NO: 321. In some embodiments, the nucleotide sequence of the antisense strand differs by no more than 3 (e.g., 0, 1, 2, or 3) nucleotides from the nucleotide sequence set forth in SEQ ID NO: 321. In some embodiments, the nucleotide sequence of the antisense strand differs by no more than 2 (e.g., 0, 1, or 2) nucleotides from the nucleotide sequence set forth in SEQ ID NO: 321. In some embodiments, the nucleotide sequence of the antisense strand differs by no more than 1 (e.g., 0 or 1) nucleotide from the nucleotide sequence set forth in SEQ ID NO: 321.

[0222] In some embodiments, the nucleotide sequence of the antisense strand comprises the nucleotide sequence set forth in SEQ ID NO: 321 differing by no more than 5 (e.g., 0, 1, 2, 3, 4, or 5) nucleotides from the nucleotide sequence set forth in SEQ ID NO: 321. In some embodiments, the nucleotide sequence of the antisense strand comprises the nucleotide sequence set forth in SEQ ID NO: 321 differing by no more than 3 (e.g., 0, 1, 2, or 3) nucleotides from the nucleotide sequence set forth in SEQ ID NO: 321. In some embodiments, the nucleotide sequence of the antisense strand comprises the nucleotide sequence set forth in SEQ ID NO: 321 differing by no more than 2 (e.g., 0, 1, or 2) nucleotides from the nucleotide sequence set forth in SEQ ID NO: 321. In some embodiments, the nucleotide sequence of the antisense strand comprises the nucleotide sequence set forth in SEQ ID NO: 321 differing by no more than 1 (e.g., 0 or 1) nucleotide from nucleotide sequence set forth in SEQ ID NO: 321.

[0223] In some embodiments, the nucleotide sequence of the antisense strand is at least 85%, 86%, 87%, 88%, 89%, 90%, 91%, 92%, 93%, 94%, 95%, 96%, 97%, 98%, 99% or 100% identical to the nucleotide sequence set forth in SEQ ID NO: 321. In some embodiments, the nucleotide sequence of the antisense strand is at least 90%, 91%, 92%, 93%, 94%, 95%, 96%, 97%, 98%, 99% or 100% identical to the nucleotide sequence set forth in SEQ ID NO: 321. In some embodiments, the nucleotide sequence of the antisense strand is at least 95%, 96%, 97%, 98%, 99% or 100% identical to the nucleotide sequence set forth in SEQ ID NO: 321. In some embodiments, the nucleotide sequence of the antisense strand is at least 96%, 97%, 98%, 99% or 100% identical to the nucleotide sequence set forth in SEQ ID NO: 321. In some embodiments, the nucleotide sequence of the antisense strand is at least 97%, identical to the nucleotide sequence set forth in SEQ ID NO: 321. In some embodiments, the nucleotide sequence of the antisense strand is at least 98% identical to the nucleotide sequence set forth in SEQ ID NO: 321. In some embodiments, the nucleotide sequence of the antisense strand is at least 99% identical to the nucleotide sequence set forth in SEQ ID NO: 321. In some embodiments, the nucleotide sequence of the antisense strand is 100% identical to the nucleotide sequence set forth in SEQ ID NO: 321.

[0224] In some embodiments, the nucleotide sequence of the antisense strand comprises the nucleotide sequence set forth in SEQ ID NO: 321. In some embodiments, the nucleotide sequence of the antisense strand consists of the nucleotide sequence set forth in SEQ ID NO: 321.

[0225] Table 2 or Table 3 further identifies the target nucleic acid molecule within the cited reference CIDEB mRNA transcript (SEQ ID NO: 1) targeted by each of the antisense strands. As such, the disclosure further provides an antisense strand wherein the nucleotide sequence of the antisense strand differs by no more than 5 (e.g., 0, 1, 2, 3, 4, or 5 (e.g., no more than 3 (e.g., 0, 1, 2, or 3))) nucleotides from the nucleotide sequence set forth in SEQ ID NO: 321 and further comprising additional nucleotide sequences (e.g., comprising from about 1-10, 1-9, 1-8, 1-7, 1-6, 1-5, 1-4, 1-3, or 1-2 nucleotides) at least partially complementary to the region contiguous (e.g., either at the 3′ end, the 5′ end, or both the 3′ and 5′ end) of the CIDEB mRNA transcript targeted by the select antisense strand.

[0226] In some embodiments, the antisense strand comprises at least 15 (e.g., 15, 16, 17, 18, 19, 20, 21, 22, 23, 24, 25, 26, 27, 28, 29, 30 (e.g., 19, 20, 21, 22, 23 (e.g., 23))) contiguous nucleotides differing by no more than 3 (e.g., 0, 1, 2, or 3) nucleotides from the nucleotide sequence set forth in SEQ ID NO: 321. In some embodiments, the antisense strand comprises at least 19 (e.g., 20, 21, 22, 23, 24, 25, 26, 27, 28, 29, 30 (e.g., 19, 20, 21, 22, 23 (e.g., 23))) contiguous nucleotides differing by no more than 3 (e.g., 0, 1, 2, or 3) nucleotides from the nucleotide sequence of any one of the antisense strands set forth in SEQ ID NO: 321. In some embodiments, the antisense strand comprises at least 21 (e.g., 22, 23, 24, 25, 26, 27, 28, 29, 30 (e.g., 21, 22, 23 (e.g., 23))) contiguous nucleotides differing by no more than 3 (e.g., 0, 1, 2, or 3) nucleotides from the nucleotide sequence set forth in SEQ ID NO: 321. In some embodiments, the antisense strand comprises at least 23 (e.g., 24, 25, 26, 27, 28, 29, 30) contiguous nucleotides differing by no more than 3 (e.g., 0, 1, 2, or 3) nucleotides from the nucleotide sequence set forth in SEQ ID NO: 321.

[0227] In some embodiments, the antisense strand comprises from about 15-23 (e.g., 15-22, 15-21, 15-20, 15-19, 15-18, 15-17, 15-16, 16-22, 16-20, 16-19, 16-18, 16-17, 17-23, 17-22, 17-21, 17-20, 17-19, 17-18, 18-23, 18-22, 18-21, 18-20, 18-19, 19-23, 19-22, 19-21, 19-20, 20-23, 20-22, 20-21, 21-23, 21-22, 22-23) contiguous nucleotides differing by no more than 3 (e.g., 0, 1, 2, or 3) nucleotides from the nucleotide sequence set forth in SEQ ID NO: 321. In some embodiments, the antisense strand comprises from about 19-23 (e.g., 19-22, 19-21, 19-20, 20-23, 20-22, 20-21, 21-23, 21-22, 22-23) contiguous nucleotides differing by no more than 3 (e.g., 0, 1, 2, or 3) nucleotides from the nucleotide sequence set forth in SEQ ID NO: 321. In some embodiments, the antisense strand comprises from about 21-23 (e.g., 21-22, 22-23) contiguous nucleotides differing by no more than 3 (e.g., 0, 1, 2, or 3) nucleotides from the nucleotide sequence set forth in SEQ ID NO: 321.

[0228] In some embodiments, the nucleotide sequence of the antisense strand comprises the nucleotide sequence set forth in SEQ ID NO: 321 differing by no more than 3 (e.g., 0, 1, 2, or 3) nucleotides from the nucleotide sequence set forth in any one of SEQ ID NOS: 321. In some embodiments, the nucleotide sequence of the antisense strand comprises the nucleotide sequence set forth in SEQ ID NO: 321.

[0229] As described above, Table 2 or Table 3 further identifies the target nucleic acid molecule within the cited reference CIDEB mRNA transcript (SEQ ID NO: 1) targeted by each of the antisense strands. The disclosure further provides antisense strands comprising at least 15 (e.g., 15, 16, 17, 18, 19, 20, 21, 22, 23, 24, 25, 26, 27, 28, 29, 30 (e.g., 19, 20, 21, 22, 23 (e.g., 23))) contiguous nucleotides differing by no more than 3 (e.g., 0, 1, 2, or 3) nucleotides from the nucleotide sequence set forth in SEQ ID NO: 321 and further comprising additional nucleotide sequences (e.g., comprising from about 1-10, 1-9, 1-8, 1-7, 1-6, 1-5, 1-4, 1-3, or 1-2 nucleotides) at least partially complementary to the region contiguous (e.g., either at the 3′ end, the 5′ end, or both the 3′ and 5′ end) of the CIDEB mRNA transcript targeted by the select antisense strand.

[0230] In some embodiments, the antisense strand comprises at least 15 (e.g., 15, 16, 17, 18, 19, 20, 21, 22, 23, 24, 25, 26, 27, 28, 29, 30 (e.g., 19, 20, 21, 22, 23 (e.g., 23))) contiguous nucleotides differing by no more than 3 (e.g., 0, 1, 2, or 3) nucleotides from the nucleotide sequence set forth in SEQ ID NO: 355. In some embodiments, the antisense strand comprises at least 19 (e.g., 20, 21, 22, 23, 24, 25, 26, 27, 28, 29, 30 (e.g., 19, 20, 21, 22, 23 (e.g., 23))) contiguous nucleotides differing by no more than 3 (e.g., 0, 1, 2, or 3) nucleotides from the nucleotide sequence of any one of the antisense strands set forth in SEQ ID NO: 355. In some embodiments, the antisense strand comprises at least 21 (e.g., 22, 23, 24, 25, 26, 27, 28, 29, 30 (e.g., 21, 22, 23 (e.g., 23))) contiguous nucleotides differing by no more than 3 (e.g., 0, 1, 2, or 3) nucleotides from the nucleotide sequence set forth in SEQ ID NO: 355. In some embodiments, the antisense strand comprises at least 23 (e.g., 24, 25, 26, 27, 28, 29, 30) contiguous nucleotides differing by no more than 3 (e.g., 0, 1, 2, or 3) nucleotides from the nucleotide sequence set forth in SEQ ID NO: 355.

[0231] In some embodiments, the nucleotide sequence of the antisense strand differs by no more than 5 (e.g., 0, 1, 2, 3, 4, or 5) nucleotides from the nucleotide sequence set forth in SEQ ID NO: 355. In some embodiments, the nucleotide sequence of the antisense strand differs by no more than 3 (e.g., 0, 1, 2, or 3) nucleotides from the nucleotide sequence set forth in SEQ ID NO: 355. In some embodiments, the nucleotide sequence of the antisense strand differs by no more than 2 (e.g., 0, 1, or 2) nucleotides from the nucleotide sequence set forth in SEQ ID NO: 355. In some embodiments, the nucleotide sequence of the antisense strand differs by no more than 1 (e.g., 0 or 1) nucleotide from the nucleotide sequence set forth in SEQ ID NO: 355.

[0232] In some embodiments, the nucleotide sequence of the antisense strand comprises the nucleotide sequence set forth in SEQ ID NO: 355 differing by no more than 5 (e.g., 0, 1, 2, 3, 4, or 5) nucleotides from the nucleotide sequence set forth in SEQ ID NO: 355. In some embodiments, the nucleotide sequence of the antisense strand comprises the nucleotide sequence set forth in SEQ ID NO: 355 differing by no more than 3 (e.g., 0, 1, 2, or 3) nucleotides from the nucleotide sequence set forth in SEQ ID NO: 355. In some embodiments, the nucleotide sequence of the antisense strand comprises the nucleotide sequence set forth in SEQ ID NO: 355 differing by no more than 2 (e.g., 0, 1, or 2) nucleotides from the nucleotide sequence set forth in SEQ ID NO: 355. In some embodiments, the nucleotide sequence of the antisense strand comprises the nucleotide sequence set forth in SEQ ID NO: 355 differing by no more than 1 (e.g., 0 or 1) nucleotide from nucleotide sequence set forth in SEQ ID NO: 355.

[0233] In some embodiments, the nucleotide sequence of the antisense strand is at least 85%, 86%, 87%, 88%, 89%, 90%, 91%, 92%, 93%, 94%, 95%, 96%, 97%, 98%, 99% or 100% identical to the nucleotide sequence set forth in SEQ ID NO: 355. In some embodiments, the nucleotide sequence of the antisense strand is at least 90%, 91%, 92%, 93%, 94%, 95%, 96%, 97%, 98%, 99% or 100% identical to the nucleotide sequence set forth in SEQ ID NO: 355. In some embodiments, the nucleotide sequence of the antisense strand is at least 95%, 96%, 97%, 98%, 99% or 100% identical to the nucleotide sequence set forth in SEQ ID NO: 355. In some embodiments, the nucleotide sequence of the antisense strand is at least 96%, 97%, 98%, 99% or 100% identical to the nucleotide sequence set forth in SEQ ID NO: 355. In some embodiments, the nucleotide sequence of the antisense strand is at least 97%, identical to the nucleotide sequence set forth in SEQ ID NO: 355. In some embodiments, the nucleotide sequence of the antisense strand is at least 98% identical to the nucleotide sequence set forth in SEQ ID NO: 355. In some embodiments, the nucleotide sequence of the antisense strand is at least 99% identical to the nucleotide sequence set forth in SEQ ID NO: 355. In some embodiments, the nucleotide sequence of the antisense strand is 100% identical to the nucleotide sequence set forth in SEQ ID NO: 355.

[0234] In some embodiments, the nucleotide sequence of the antisense strand comprises the nucleotide sequence set forth in SEQ ID NO: 355. In some embodiments, the nucleotide sequence of the antisense strand consists of the nucleotide sequence set forth in SEQ ID NO: 355.

[0235] Table 2 or Table 3 further identifies the target nucleic acid molecule within the cited reference CIDEB mRNA transcript (SEQ ID NO: 1) targeted by each of the antisense strands. As such, the disclosure further provides an antisense strand wherein the nucleotide sequence of the antisense strand differs by no more than 5 (e.g., 0, 1, 2, 3, 4, or 5 (e.g., no more than 3 (e.g., 0, 1, 2, or 3))) nucleotides from the nucleotide sequence set forth in SEQ ID NO: 355 and further comprising additional nucleotide sequences (e.g., comprising from about 1-10, 1-9, 1-8, 1-7, 1-6, 1-5, 1-4, 1-3, or 1-2 nucleotides) at least partially complementary to the region contiguous (e.g., either at the 3′ end, the 5′ end, or both the 3′ and 5′ end) of the CIDEB mRNA transcript targeted by the select antisense strand.

[0236] In some embodiments, the antisense strand comprises from about 15-23 (e.g., 15-22, 15-21, 15-20, 15-19, 15-18, 15-17, 15-16, 16-22, 16-20, 16-19, 16-18, 16-17, 17-23, 17-22, 17-21, 17-20, 17-19, 17-18, 18-23, 18-22, 18-21, 18-20, 18-19, 19-23, 19-22, 19-21, 19-20, 20-23, 20-22, 20-21, 21-23, 21-22, 22-23) contiguous nucleotides differing by no more than 3 (e.g., 0, 1, 2, or 3) nucleotides from the nucleotide sequence set forth in SEQ ID NO: 355. In some embodiments, the antisense strand comprises from about 19-23 (e.g., 19-22, 19-21, 19-20, 20-23, 20-22, 20-21, 21-23, 21-22, 22-23) contiguous nucleotides differing by no more than 3 (e.g., 0, 1, 2, or 3) nucleotides from the nucleotide sequence set forth in SEQ ID NO: 355. In some embodiments, the antisense strand comprises from about 21-23 (e.g., 21-22, 22-23) contiguous nucleotides differing by no more than 3 (e.g., 0, 1, 2, or 3) nucleotides from the nucleotide sequence set forth in SEQ ID NO: 355.

[0237] In some embodiments, the nucleotide sequence of the antisense strand comprises the nucleotide sequence set forth in SEQ ID NO: 355 differing by no more than 3 (e.g., 0, 1, 2, or 3) nucleotides from the nucleotide sequence set forth in any one of SEQ ID NOS: 355. In some embodiments, the nucleotide sequence of the antisense strand comprises the nucleotide sequence set forth in SEQ ID NO: 355.

[0238] As described above, Table 2 or Table 3 further identifies the target nucleic acid molecule within the cited reference CIDEB mRNA transcript (SEQ ID NO: 1) targeted by each of the antisense strands. The disclosure further provides antisense strands comprising at least 15 (e.g., 15, 16, 17, 18, 19, 20, 21, 22, 23, 24, 25, 26, 27, 28, 29, 30 (e.g., 19, 20, 21, 22, 23 (e.g., 23))) contiguous nucleotides differing by no more than 3 (e.g., 0, 1, 2, or 3) nucleotides from the nucleotide sequence set forth in SEQ ID NO: 355 and further comprising additional nucleotide sequences (e.g., comprising from about 1-10, 1-9, 1-8, 1-7, 1-6, 1-5, 1-4, 1-3, or 1-2 nucleotides) at least partially complementary to the region contiguous (e.g., either at the 3′ end, the 5′ end, or both the 3′ and 5′ end) of the CIDEB mRNA transcript targeted by the select antisense strand.

[0239] In some embodiments, the nucleotide sequence of the antisense strand differs by no more than 5 (e.g., 0, 1, 2, 3, 4, or 5) nucleotides from the nucleotide sequence set forth in SEQ ID NO: 356. In some embodiments, the nucleotide sequence of the antisense strand differs by no more than 3 (e.g., 0, 1, 2, or 3) nucleotides from the nucleotide sequence set forth in SEQ ID NO: 356. In some embodiments, the nucleotide sequence of the antisense strand differs by no more than 2 (e.g., 0, 1, or 2) nucleotides from the nucleotide sequence set forth in SEQ ID NO: 356. In some embodiments, the nucleotide sequence of the antisense strand differs by no more than 1 (e.g., 0 or 1) nucleotide from the nucleotide sequence set forth in SEQ ID NO: 356.

[0240] In some embodiments, the nucleotide sequence of the antisense strand comprises the nucleotide sequence set forth in SEQ ID NO: 356 differing by no more than 5 (e.g., 0, 1, 2, 3, 4, or 5) nucleotides from the nucleotide sequence set forth in SEQ ID NO: 356. In some embodiments, the nucleotide sequence of the antisense strand comprises the nucleotide sequence set forth in SEQ ID NO: 356 differing by no more than 3 (e.g., 0, 1, 2, or 3) nucleotides from the nucleotide sequence set forth in SEQ ID NO: 356. In some embodiments, the nucleotide sequence of the antisense strand comprises the nucleotide sequence set forth in SEQ ID NO: 356 differing by no more than 2 (e.g., 0, 1, or 2) nucleotides from the nucleotide sequence set forth in SEQ ID NO: 356. In some embodiments, the nucleotide sequence of the antisense strand comprises the nucleotide sequence set forth in SEQ ID NO: 356 differing by no more than 1 (e.g., 0 or 1) nucleotide from nucleotide sequence set forth in SEQ ID NO: 356.

[0241] In some embodiments, the nucleotide sequence of the antisense strand is at least 85%, 86%, 87%, 88%, 89%, 90%, 91%, 92%, 93%, 94%, 95%, 96%, 97%, 98%, 99% or 100% identical to the nucleotide sequence set forth in SEQ ID NO: 356. In some embodiments, the nucleotide sequence of the antisense strand is at least 90%, 91%, 92%, 93%, 94%, 95%, 96%, 97%, 98%, 99% or 100% identical to the nucleotide sequence set forth in SEQ ID NO: 356. In some embodiments, the nucleotide sequence of the antisense strand is at least 95%, 96%, 97%, 98%, 99% or 100% identical to the nucleotide sequence set forth in SEQ ID NO: 356. In some embodiments, the nucleotide sequence of the antisense strand is at least 96%, 97%, 98%, 99% or 100% identical to the nucleotide sequence set forth in SEQ ID NO: 356. In some embodiments, the nucleotide sequence of the antisense strand is at least 97%, identical to the nucleotide sequence set forth in SEQ ID NO: 356. In some embodiments, the nucleotide sequence of the antisense strand is at least 98% identical to the nucleotide sequence set forth in SEQ ID NO: 356. In some embodiments, the nucleotide sequence of the antisense strand is at least 99% identical to the nucleotide sequence set forth in SEQ ID NO: 356. In some embodiments, the nucleotide sequence of the antisense strand is 100% identical to the nucleotide sequence set forth in SEQ ID NO: 356.

[0242] In some embodiments, the nucleotide sequence of the antisense strand comprises the nucleotide sequence set forth in SEQ ID NO: 356. In some embodiments, the nucleotide sequence of the antisense strand consists of the nucleotide sequence set forth in SEQ ID NO: 356.

[0243] Table 2 or Table 3 further identifies the target nucleic acid molecule within the cited reference CIDEB mRNA transcript (SEQ ID NO: 1) targeted by each of the antisense strands. As such, the disclosure further provides an antisense strand wherein the nucleotide sequence of the antisense strand differs by no more than 5 (e.g., 0, 1, 2, 3, 4, or 5 (e.g., no more than 3 (e.g., 0, 1, 2, or 3))) nucleotides from the nucleotide sequence set forth in SEQ ID NO: 356 and further comprising additional nucleotide sequences (e.g., comprising from about 1-10, 1-9, 1-8, 1-7, 1-6, 1-5, 1-4, 1-3, or 1-2 nucleotides) at least partially complementary to the region contiguous (e.g., either at the 3′ end, the 5′ end, or both the 3′ and 5′ end) of the CIDEB mRNA transcript targeted by the select antisense strand.

[0244] In some embodiments, the antisense strand comprises at least 15 (e.g., 15, 16, 17, 18, 19, 20, 21, 22, 23, 24, 25, 26, 27, 28, 29, 30 (e.g., 19, 20, 21, 22, 23 (e.g., 23))) contiguous nucleotides differing by no more than 3 (e.g., 0, 1, 2, or 3) nucleotides from the nucleotide sequence set forth in SEQ ID NO: 356. In some embodiments, the antisense strand comprises at least 19 (e.g., 20, 21, 22, 23, 24, 25, 26, 27, 28, 29, 30 (e.g., 19, 20, 21, 22, 23 (e.g., 23))) contiguous nucleotides differing by no more than 3 (e.g., 0, 1, 2, or 3) nucleotides from the nucleotide sequence of any one of the antisense strands set forth in SEQ ID NO: 356. In some embodiments, the antisense strand comprises at least 21 (e.g., 22, 23, 24, 25, 26, 27, 28, 29, 30 (e.g., 21, 22, 23 (e.g., 23))) contiguous nucleotides differing by no more than 3 (e.g., 0, 1, 2, or 3) nucleotides from the nucleotide sequence set forth in SEQ ID NO: 356. In some embodiments, the antisense strand comprises at least 23 (e.g., 24, 25, 26, 27, 28, 29, 30) contiguous nucleotides differing by no more than 3 (e.g., 0, 1, 2, or 3) nucleotides from the nucleotide sequence set forth in SEQ ID NO: 356.

[0245] In some embodiments, the antisense strand comprises from about 15-23 (e.g., 15-22, 15-21, 15-20, 15-19, 15-18, 15-17, 15-16, 16-22, 16-20, 16-19, 16-18, 16-17, 17-23, 17-22, 17-21, 17-20, 17-19, 17-18, 18-23, 18-22, 18-21, 18-20, 18-19, 19-23, 19-22, 19-21, 19-20, 20-23, 20-22, 20-21, 21-23, 21-22, 22-23) contiguous nucleotides differing by no more than 3 (e.g., 0, 1, 2, or 3) nucleotides from the nucleotide sequence set forth in SEQ ID NO: 356. In some embodiments, the antisense strand comprises from about 19-23 (e.g., 19-22, 19-21, 19-20, 20-23, 20-22, 20-21, 21-23, 21-22, 22-23) contiguous nucleotides differing by no more than 3 (e.g., 0, 1, 2, or 3) nucleotides from the nucleotide sequence set forth in SEQ ID NO: 356. In some embodiments, the antisense strand comprises from about 21-23 (e.g., 21-22, 22-23) contiguous nucleotides differing by no more than 3 (e.g., 0, 1, 2, or 3) nucleotides from the nucleotide sequence set forth in SEQ ID NO: 356.

[0246] In some embodiments, the nucleotide sequence of the antisense strand comprises the nucleotide sequence set forth in SEQ ID NO: 356 differing by no more than 3 (e.g., 0, 1, 2, or 3) nucleotides from the nucleotide sequence set forth in any one of SEQ ID NOS: 356. In some embodiments, the nucleotide sequence of the antisense strand comprises the nucleotide sequence set forth in SEQ ID NO: 356.

[0247] As described above, Table 2 or Table 3 further identifies the target nucleic acid molecule within the cited reference CIDEB mRNA transcript (SEQ ID NO: 1) targeted by each of the antisense strands. The disclosure further provides antisense strands comprising at least 15 (e.g., 15, 16, 17, 18, 19, 20, 21, 22, 23, 24, 25, 26, 27, 28, 29, 30 (e.g., 19, 20, 21, 22, 23 (e.g., 23))) contiguous nucleotides differing by no more than 3 (e.g., 0, 1, 2, or 3) nucleotides from the nucleotide sequence set forth in SEQ ID NO: 356 and further comprising additional nucleotide sequences (e.g., comprising from about 1-10, 1-9, 1-8, 1-7, 1-6, 1-5, 1-4, 1-3, or 1-2 nucleotides) at least partially complementary to the region contiguous (e.g., either at the 3′ end, the 5′ end, or both the 3′ and 5′ end) of the CIDEB mRNA transcript targeted by the select antisense strand.

[0248] In some embodiments, the nucleotide sequence of the antisense strand differs by no more than 5 (e.g., 0, 1, 2, 3, 4, or 5) nucleotides from the nucleotide sequence set forth in SEQ ID NO: 1188. In some embodiments, the nucleotide sequence of the antisense strand differs by no more than 3 (e.g., 0, 1, 2, or 3) nucleotides from the nucleotide sequence set forth in SEQ ID NO: 1188. In some embodiments, the nucleotide sequence of the antisense strand differs by no more than 2 (e.g., 0, 1, or 2) nucleotides from the nucleotide sequence set forth in SEQ ID NO: 1188. In some embodiments, the nucleotide sequence of the antisense strand differs by no more than 1 (e.g., 0 or 1) nucleotide from the nucleotide sequence set forth in SEQ ID NO: 1188.

[0249] In some embodiments, the nucleotide sequence of the antisense strand comprises the nucleotide sequence set forth in SEQ ID NO: 1188 differing by no more than 5 (e.g., 0, 1, 2, 3, 4, or 5) nucleotides from the nucleotide sequence set forth in SEQ ID NO: 1188. In some embodiments, the nucleotide sequence of the antisense strand comprises the nucleotide sequence set forth in SEQ ID NO: 1188 differing by no more than 3 (e.g., 0, 1, 2, or 3) nucleotides from the nucleotide sequence set forth in SEQ ID NO: 1188. In some embodiments, the nucleotide sequence of the antisense strand comprises the nucleotide sequence set forth in SEQ ID NO: 1188 differing by no more than 2 (e.g., 0, 1, or 2) nucleotides from the nucleotide sequence set forth in SEQ ID NO: 1188. In some embodiments, the nucleotide sequence of the antisense strand comprises the nucleotide sequence set forth in SEQ ID NO: 1188 differing by no more than 1 (e.g., 0 or 1) nucleotide from nucleotide sequence set forth in SEQ ID NO: 1188.

[0250] In some embodiments, the nucleotide sequence of the antisense strand is at least 85%, 86%, 87%, 88%, 89%, 90%, 91%, 92%, 93%, 94%, 95%, 96%, 97%, 98%, 99% or 100% identical to the nucleotide sequence set forth in SEQ ID NO: 1188. In some embodiments, the nucleotide sequence of the antisense strand is at least 90%, 91%, 92%, 93%, 94%, 95%, 96%, 97%, 98%, 99% or 100% identical to the nucleotide sequence set forth in SEQ ID NO: 1188. In some embodiments, the nucleotide sequence of the antisense strand is at least 95%, 96%, 97%, 98%, 99% or 100% identical to the nucleotide sequence set forth in SEQ ID NO: 1188. In some embodiments, the nucleotide sequence of the antisense strand is at least 96%, 97%, 98%, 99% or 100% identical to the nucleotide sequence set forth in SEQ ID NO: 1188. In some embodiments, the nucleotide sequence of the antisense strand is at least 97%, identical to the nucleotide sequence set forth in SEQ ID NO: 1188. In some embodiments, the nucleotide sequence of the antisense strand is at least 98% identical to the nucleotide sequence set forth in SEQ ID NO: 1188. In some embodiments, the nucleotide sequence of the antisense strand is at least 99% identical to the nucleotide sequence set forth in SEQ ID NO: 1188. In some embodiments, the nucleotide sequence of the antisense strand is 100% identical to the nucleotide sequence set forth in SEQ ID NO: 1188.

[0251] In some embodiments, the nucleotide sequence of the antisense strand comprises the nucleotide sequence set forth in SEQ ID NO: 1188. In some embodiments, the nucleotide sequence of the antisense strand consists of the nucleotide sequence set forth in SEQ ID NO: 1188.

[0252] Table 2 or Table 3 further identifies the target nucleic acid molecule within the cited reference CIDEB mRNA transcript (SEQ ID NO: 1) targeted by each of the antisense strands. As such, the disclosure further provides an antisense strand wherein the nucleotide sequence of the antisense strand differs by no more than 5 (e.g., 0, 1, 2, 3, 4, or 5 (e.g., no more than 3 (e.g., 0, 1, 2, or 3))) nucleotides from the nucleotide sequence set forth in SEQ ID NO: 1188 and further comprising additional nucleotide sequences (e.g., comprising from about 1-10, 1-9, 1-8, 1-7, 1-6, 1-5, 1-4, 1-3, or 1-2 nucleotides) at least partially complementary to the region contiguous (e.g., either at the 3′ end, the 5′ end, or both the 3′ and 5′ end) of the CIDEB mRNA transcript targeted by the select antisense strand.

[0253] In some embodiments, the antisense strand comprises at least 15 (e.g., 15, 16, 17, 18, 19, 20, 21, 22, 23, 24, 25, 26, 27, 28, 29, 30 (e.g., 19, 20, 21, 22, 23 (e.g., 23))) contiguous nucleotides differing by no more than 3 (e.g., 0, 1, 2, or 3) nucleotides from the nucleotide sequence set forth in SEQ ID NO: 1188. In some embodiments, the antisense strand comprises at least 19 (e.g., 20, 21, 22, 23, 24, 25, 26, 27, 28, 29, 30 (e.g., 19, 20, 21, 22, 23 (e.g., 23))) contiguous nucleotides differing by no more than 3 (e.g., 0, 1, 2, or 3) nucleotides from the nucleotide sequence of any one of the antisense strands set forth in SEQ ID NO: 1188. In some embodiments, the antisense strand comprises at least 21 (e.g., 22, 23, 24, 25, 26, 27, 28, 29, 30 (e.g., 21, 22, 23 (e.g., 23))) contiguous nucleotides differing by no more than 3 (e.g., 0, 1, 2, or 3) nucleotides from the nucleotide sequence set forth in SEQ ID NO: 1188. In some embodiments, the antisense strand comprises at least 23 (e.g., 24, 25, 26, 27, 28, 29, 30) contiguous nucleotides differing by no more than 3 (e.g., 0, 1, 2, or 3) nucleotides from the nucleotide sequence set forth in SEQ ID NO: 1188.

[0254] In some embodiments, the antisense strand comprises from about 15-23 (e.g., 15-22, 15-21, 15-20, 15-19, 15-18, 15-17, 15-16, 16-22, 16-20, 16-19, 16-18, 16-17, 17-23, 17-22, 17-21, 17-20, 17-19, 17-18, 18-23, 18-22, 18-21, 18-20, 18-19, 19-23, 19-22, 19-21, 19-20, 20-23, 20-22, 20-21, 21-23, 21-22, 22-23) contiguous nucleotides differing by no more than 3 (e.g., 0, 1, 2, or 3) nucleotides from the nucleotide sequence set forth in SEQ ID NO: 1188. In some embodiments, the antisense strand comprises from about 19-23 (e.g., 19-22, 19-21, 19-20, 20-23, 20-22, 20-21, 21-23, 21-22, 22-23) contiguous nucleotides differing by no more than 3 (e.g., 0, 1, 2, or 3) nucleotides from the nucleotide sequence set forth in SEQ ID NO: 1188. In some embodiments, the antisense strand comprises from about 21-23 (e.g., 21-22, 22-23) contiguous nucleotides differing by no more than 3 (e.g., 0, 1, 2, or 3) nucleotides from the nucleotide sequence set forth in SEQ ID NO: 1188.

[0255] In some embodiments, the nucleotide sequence of the antisense strand comprises the nucleotide sequence set forth in SEQ ID NO: 1188 differing by no more than 3 (e.g., 0, 1, 2, or 3) nucleotides from the nucleotide sequence set forth in any one of SEQ ID NOS: 1188. In some embodiments, the nucleotide sequence of the antisense strand comprises the nucleotide sequence set forth in SEQ ID NO: 1188.

[0256] As described above, Table 2 or Table 3 further identifies the target nucleic acid molecule within the cited reference CIDEB mRNA transcript (SEQ ID NO: 1) targeted by each of the antisense strands. The disclosure further provides antisense strands comprising at least 15 (e.g., 15, 16, 17, 18, 19, 20, 21, 22, 23, 24, 25, 26, 27, 28, 29, 30 (e.g., 19, 20, 21, 22, 23 (e.g., 23))) contiguous nucleotides differing by no more than 3 (e.g., 0, 1, 2, or 3) nucleotides from the nucleotide sequence set forth in SEQ ID NO: 1188 and further comprising additional nucleotide sequences (e.g., comprising from about 1-10, 1-9, 1-8, 1-7, 1-6, 1-5, 1-4, 1-3, or 1-2 nucleotides) at least partially complementary to the region contiguous (e.g., either at the 3′ end, the 5′ end, or both the 3′ and 5′ end) of the CIDEB mRNA transcript targeted by the select antisense strand.

[0257] In some embodiments, the nucleotide sequence of the antisense strand differs by no more than 5 (e.g., 0, 1, 2, 3, 4, or 5) nucleotides from the nucleotide sequence set forth in SEQ ID NO: 1190. In some embodiments, the nucleotide sequence of the antisense strand differs by no more than 3 (e.g., 0, 1, 2, or 3) nucleotides from the nucleotide sequence set forth in SEQ ID NO: 1190. In some embodiments, the nucleotide sequence of the antisense strand differs by no more than 2 (e.g., 0, 1, or 2) nucleotides from the nucleotide sequence set forth in SEQ ID NO: 1190. In some embodiments, the nucleotide sequence of the antisense strand differs by no more than 1 (e.g., 0 or 1) nucleotide from the nucleotide sequence set forth in SEQ ID NO: 1190.

[0258] In some embodiments, the nucleotide sequence of the antisense strand comprises the nucleotide sequence set forth in SEQ ID NO: 1190 differing by no more than 5 (e.g., 0, 1, 2, 3, 4, or 5) nucleotides from the nucleotide sequence set forth in SEQ ID NO: 1190. In some embodiments, the nucleotide sequence of the antisense strand comprises the nucleotide sequence set forth in SEQ ID NO: 1190 differing by no more than 3 (e.g., 0, 1, 2, or 3) nucleotides from the nucleotide sequence set forth in SEQ ID NO: 1190. In some embodiments, the nucleotide sequence of the antisense strand comprises the nucleotide sequence set forth in SEQ ID NO: 1190 differing by no more than 2 (e.g., 0, 1, or 2) nucleotides from the nucleotide sequence set forth in SEQ ID NO: 1190. In some embodiments, the nucleotide sequence of the antisense strand comprises the nucleotide sequence set forth in SEQ ID NO: 1190 differing by no more than 1 (e.g., 0 or 1) nucleotide from nucleotide sequence set forth in SEQ ID NO: 1190.

[0259] In some embodiments, the nucleotide sequence of the antisense strand is at least 85%, 86%, 87%, 88%, 89%, 90%, 91%, 92%, 93%, 94%, 95%, 96%, 97%, 98%, 99% or 100% identical to the nucleotide sequence set forth in SEQ ID NO: 1190. In some embodiments, the nucleotide sequence of the antisense strand is at least 90%, 91%, 92%, 93%, 94%, 95%, 96%, 97%, 98%, 99% or 100% identical to the nucleotide sequence set forth in SEQ ID NO: 1190. In some embodiments, the nucleotide sequence of the antisense strand is at least 95%, 96%, 97%, 98%, 99% or 100% identical to the nucleotide sequence set forth in SEQ ID NO: 1190. In some embodiments, the nucleotide sequence of the antisense strand is at least 96%, 97%, 98%, 99% or 100% identical to the nucleotide sequence set forth in SEQ ID NO: 1190. In some embodiments, the nucleotide sequence of the antisense strand is at least 97%, identical to the nucleotide sequence set forth in SEQ ID NO: 1190. In some embodiments, the nucleotide sequence of the antisense strand is at least 98% identical to the nucleotide sequence set forth in SEQ ID NO: 1190. In some embodiments, the nucleotide sequence of the antisense strand is at least 99% identical to the nucleotide sequence set forth in SEQ ID NO: 1190. In some embodiments, the nucleotide sequence of the antisense strand is 100% identical to the nucleotide sequence set forth in SEQ ID NO: 1190.

[0260] In some embodiments, the nucleotide sequence of the antisense strand comprises the nucleotide sequence set forth in SEQ ID NO: 1190. In some embodiments, the nucleotide sequence of the antisense strand consists of the nucleotide sequence set forth in SEQ ID NO: 1190.

[0261] Table 2 or Table 3 further identifies the target nucleic acid molecule within the cited reference CIDEB mRNA transcript (SEQ ID NO: 1) targeted by each of the antisense strands. As such, the disclosure further provides an antisense strand wherein the nucleotide sequence of the antisense strand differs by no more than 5 (e.g., 0, 1, 2, 3, 4, or 5 (e.g., no more than 3 (e.g., 0, 1, 2, or 3))) nucleotides from the nucleotide sequence set forth in SEQ ID NO: 1190 and further comprising additional nucleotide sequences (e.g., comprising from about 1-10, 1-9, 1-8, 1-7, 1-6, 1-5, 1-4, 1-3, or 1-2 nucleotides) at least partially complementary to the region contiguous (e.g., either at the 3′ end, the 5′ end, or both the 3′ and 5′ end) of the CIDEB mRNA transcript targeted by the select antisense strand.

[0262] In some embodiments, the antisense strand comprises at least 15 (e.g., 15, 16, 17, 18, 19, 20, 21, 22, 23, 24, 25, 26, 27, 28, 29, 30 (e.g., 19, 20, 21, 22, 23 (e.g., 23))) contiguous nucleotides differing by no more than 3 (e.g., 0, 1, 2, or 3) nucleotides from the nucleotide sequence set forth in SEQ ID NO: 1190. In some embodiments, the antisense strand comprises at least 19 (e.g., 20, 21, 22, 23, 24, 25, 26, 27, 28, 29, 30 (e.g., 19, 20, 21, 22, 23 (e.g., 23))) contiguous nucleotides differing by no more than 3 (e.g., 0, 1, 2, or 3) nucleotides from the nucleotide sequence of any one of the antisense strands set forth in SEQ ID NO: 1190. In some embodiments, the antisense strand comprises at least 21 (e.g., 22, 23, 24, 25, 26, 27, 28, 29, 30 (e.g., 21, 22, 23 (e.g., 23))) contiguous nucleotides differing by no more than 3 (e.g., 0, 1, 2, or 3) nucleotides from the nucleotide sequence set forth in SEQ ID NO: 1190. In some embodiments, the antisense strand comprises at least 23 (e.g., 24, 25, 26, 27, 28, 29, 30) contiguous nucleotides differing by no more than 3 (e.g., 0, 1, 2, or 3) nucleotides from the nucleotide sequence set forth in SEQ ID NO: 1190.

[0263] In some embodiments, the antisense strand comprises from about 15-23 (e.g., 15-22, 15-21, 15-20, 15-19, 15-18, 15-17, 15-16, 16-22, 16-20, 16-19, 16-18, 16-17, 17-23, 17-22, 17-21, 17-20, 17-19, 17-18, 18-23, 18-22, 18-21, 18-20, 18-19, 19-23, 19-22, 19-21, 19-20, 20-23, 20-22, 20-21, 21-23, 21-22, 22-23) contiguous nucleotides differing by no more than 3 (e.g., 0, 1, 2, or 3) nucleotides from the nucleotide sequence set forth in SEQ ID NO: 1190. In some embodiments, the antisense strand comprises from about 19-23 (e.g., 19-22, 19-21, 19-20, 20-23, 20-22, 20-21, 21-23, 21-22, 22-23) contiguous nucleotides differing by no more than 3 (e.g., 0, 1, 2, or 3) nucleotides from the nucleotide sequence set forth in SEQ ID NO: 1190. In some embodiments, the antisense strand comprises from about 21-23 (e.g., 21-22, 22-23) contiguous nucleotides differing by no more than 3 (e.g., 0, 1, 2, or 3) nucleotides from the nucleotide sequence set forth in SEQ ID NO: 1190.

[0264] In some embodiments, the nucleotide sequence of the antisense strand comprises the nucleotide sequence set forth in SEQ ID NO: 1190 differing by no more than 3 (e.g., 0, 1, 2, or 3) nucleotides from the nucleotide sequence set forth in any one of SEQ ID NOS: 1190. In some embodiments, the nucleotide sequence of the antisense strand comprises the nucleotide sequence set forth in SEQ ID NO: 1190.

[0265] As described above, Table 2 or Table 3 further identifies the target nucleic acid molecule within the cited reference CIDEB mRNA transcript (SEQ ID NO: 1) targeted by each of the antisense strands. The disclosure further provides antisense strands comprising at least 15 (e.g., 15, 16, 17, 18, 19, 20, 21, 22, 23, 24, 25, 26, 27, 28, 29, 30 (e.g., 19, 20, 21, 22, 23 (e.g., 23))) contiguous nucleotides differing by no more than 3 (e.g., 0, 1, 2, or 3) nucleotides from the nucleotide sequence set forth in SEQ ID NO: 1190 and further comprising additional nucleotide sequences (e.g., comprising from about 1-10, 1-9, 1-8, 1-7, 1-6, 1-5, 1-4, 1-3, or 1-2 nucleotides) at least partially complementary to the region contiguous (e.g., either at the 3′ end, the 5′ end, or both the 3′ and 5′ end) of the CIDEB mRNA transcript targeted by the select antisense strand.

[0266] In some embodiments, the nucleotide sequence of the antisense strand differs by no more than 5 (e.g., 0, 1, 2, 3, 4, or 5) nucleotides from the nucleotide sequence set forth in SEQ ID NO: 1191. In some embodiments, the nucleotide sequence of the antisense strand differs by no more than 3 (e.g., 0, 1, 2, or 3) nucleotides from the nucleotide sequence set forth in SEQ ID NO: 1191. In some embodiments, the nucleotide sequence of the antisense strand differs by no more than 2 (e.g., 0, 1, or 2) nucleotides from the nucleotide sequence set forth in SEQ ID NO: 1191. In some embodiments, the nucleotide sequence of the antisense strand differs by no more than 1 (e.g., 0 or 1) nucleotide from the nucleotide sequence set forth in SEQ ID NO: 1191.

[0267] In some embodiments, the nucleotide sequence of the antisense strand comprises the nucleotide sequence set forth in SEQ ID NO: 1191 differing by no more than 5 (e.g., 0, 1, 2, 3, 4, or 5) nucleotides from the nucleotide sequence set forth in SEQ ID NO: 1191. In some embodiments, the nucleotide sequence of the antisense strand comprises the nucleotide sequence set forth in SEQ ID NO: 1191 differing by no more than 3 (e.g., 0, 1, 2, or 3) nucleotides from the nucleotide sequence set forth in SEQ ID NO: 1191. In some embodiments, the nucleotide sequence of the antisense strand comprises the nucleotide sequence set forth in SEQ ID NO: 1191 differing by no more than 2 (e.g., 0, 1, or 2) nucleotides from the nucleotide sequence set forth in SEQ ID NO: 1191. In some embodiments, the nucleotide sequence of the antisense strand comprises the nucleotide sequence set forth in SEQ ID NO: 1191 differing by no more than 1 (e.g., 0 or 1) nucleotide from nucleotide sequence set forth in SEQ ID NO: 1191.

[0268] In some embodiments, the nucleotide sequence of the antisense strand is at least 85%, 86%, 87%, 88%, 89%, 90%, 91%, 92%, 93%, 94%, 95%, 96%, 97%, 98%, 99% or 100% identical to the nucleotide sequence set forth in SEQ ID NO: 1191. In some embodiments, the nucleotide sequence of the antisense strand is at least 90%, 91%, 92%, 93%, 94%, 95%, 96%, 97%, 98%, 99% or 100% identical to the nucleotide sequence set forth in SEQ ID NO: 1191. In some embodiments, the nucleotide sequence of the antisense strand is at least 95%, 96%, 97%, 98%, 99% or 100% identical to the nucleotide sequence set forth in SEQ ID NO: 1191. In some embodiments, the nucleotide sequence of the antisense strand is at least 96%, 97%, 98%, 99% or 100% identical to the nucleotide sequence set forth in SEQ ID NO: 1191. In some embodiments, the nucleotide sequence of the antisense strand is at least 97%, identical to the nucleotide sequence set forth in SEQ ID NO: 1191. In some embodiments, the nucleotide sequence of the antisense strand is at least 98% identical to the nucleotide sequence set forth in SEQ ID NO: 1191. In some embodiments, the nucleotide sequence of the antisense strand is at least 99% identical to the nucleotide sequence set forth in SEQ ID NO: 1191. In some embodiments, the nucleotide sequence of the antisense strand is 100% identical to the nucleotide sequence set forth in SEQ ID NO: 1191.

[0269] In some embodiments, the nucleotide sequence of the antisense strand comprises the nucleotide sequence set forth in SEQ ID NO: 1191. In some embodiments, the nucleotide sequence of the antisense strand consists of the nucleotide sequence set forth in SEQ ID NO: 1191.

[0270] Table 2 or Table 3 further identifies the target nucleic acid molecule within the cited reference CIDEB mRNA transcript (SEQ ID NO: 1) targeted by each of the antisense strands. As such, the disclosure further provides an antisense strand wherein the nucleotide sequence of the antisense strand differs by no more than 5 (e.g., 0, 1, 2, 3, 4, or 5 (e.g., no more than 3 (e.g., 0, 1, 2, or 3))) nucleotides from the nucleotide sequence set forth in SEQ ID NO: 1191 and further comprising additional nucleotide sequences (e.g., comprising from about 1-10, 1-9, 1-8, 1-7, 1-6, 1-5, 1-4, 1-3, or 1-2 nucleotides) at least partially complementary to the region contiguous (e.g., either at the 3′ end, the 5′ end, or both the 3′ and 5′ end) of the CIDEB mRNA transcript targeted by the select antisense strand.

[0271] In some embodiments, the antisense strand comprises at least 15 (e.g., 15, 16, 17, 18, 19, 20, 21, 22, 23, 24, 25, 26, 27, 28, 29, 30 (e.g., 19, 20, 21, 22, 23 (e.g., 23))) contiguous nucleotides differing by no more than 3 (e.g., 0, 1, 2, or 3) nucleotides from the nucleotide sequence set forth in SEQ ID NO: 1191. In some embodiments, the antisense strand comprises at least 19 (e.g., 20, 21, 22, 23, 24, 25, 26, 27, 28, 29, 30 (e.g., 19, 20, 21, 22, 23 (e.g., 23))) contiguous nucleotides differing by no more than 3 (e.g., 0, 1, 2, or 3) nucleotides from the nucleotide sequence of any one of the antisense strands set forth in SEQ ID NO: 1191. In some embodiments, the antisense strand comprises at least 21 (e.g., 22, 23, 24, 25, 26, 27, 28, 29, 30 (e.g., 21, 22, 23 (e.g., 23))) contiguous nucleotides differing by no more than 3 (e.g., 0, 1, 2, or 3) nucleotides from the nucleotide sequence set forth in SEQ ID NO: 1191. In some embodiments, the antisense strand comprises at least 23 (e.g., 24, 25, 26, 27, 28, 29, 30) contiguous nucleotides differing by no more than 3 (e.g., 0, 1, 2, or 3) nucleotides from the nucleotide sequence set forth in SEQ ID NO: 1191.

[0272] In some embodiments, the antisense strand comprises from about 15-23 (e.g., 15-22, 15-21, 15-20, 15-19, 15-18, 15-17, 15-16, 16-22, 16-20, 16-19, 16-18, 16-17, 17-23, 17-22, 17-21, 17-20, 17-19, 17-18, 18-23, 18-22, 18-21, 18-20, 18-19, 19-23, 19-22, 19-21, 19-20, 20-23, 20-22, 20-21, 21-23, 21-22, 22-23) contiguous nucleotides differing by no more than 3 (e.g., 0, 1, 2, or 3) nucleotides from the nucleotide sequence set forth in SEQ ID NO: 1191. In some embodiments, the antisense strand comprises from about 19-23 (e.g., 19-22, 19-21, 19-20, 20-23, 20-22, 20-21, 21-23, 21-22, 22-23) contiguous nucleotides differing by no more than 3 (e.g., 0, 1, 2, or 3) nucleotides from the nucleotide sequence set forth in SEQ ID NO: 1191. In some embodiments, the antisense strand comprises from about 21-23 (e.g., 21-22, 22-23) contiguous nucleotides differing by no more than 3 (e.g., 0, 1, 2, or 3) nucleotides from the nucleotide sequence set forth in SEQ ID NO: 1191.

[0273] In some embodiments, the nucleotide sequence of the antisense strand comprises the nucleotide sequence set forth in SEQ ID NO: 1191 differing by no more than 3 (e.g., 0, 1, 2, or 3) nucleotides from the nucleotide sequence set forth in any one of SEQ ID NOS: 1191. In some embodiments, the nucleotide sequence of the antisense strand comprises the nucleotide sequence set forth in SEQ ID NO: 1191.

[0274] As described above, Table 2 or Table 3 further identifies the target nucleic acid molecule within the cited reference CIDEB mRNA transcript (SEQ ID NO: 1) targeted by each of the antisense strands. The disclosure further provides antisense strands comprising at least 15 (e.g., 15, 16, 17, 18, 19, 20, 21, 22, 23, 24, 25, 26, 27, 28, 29, 30 (e.g., 19, 20, 21, 22, 23 (e.g., 23))) contiguous nucleotides differing by no more than 3 (e.g., 0, 1, 2, or 3) nucleotides from the nucleotide sequence set forth in SEQ ID NO: 1191 and further comprising additional nucleotide sequences (e.g., comprising from about 1-10, 1-9, 1-8, 1-7, 1-6, 1-5, 1-4, 1-3, or 1-2 nucleotides) at least partially complementary to the region contiguous (e.g., either at the 3′ end, the 5′ end, or both the 3′ and 5′ end) of the CIDEB mRNA transcript targeted by the select antisense strand.

[0275] In some embodiments, the nucleotide sequence of the antisense strand differs by no more than 5 (e.g., 0, 1, 2, 3, 4, or 5) nucleotides from the nucleotide sequence set forth in SEQ ID NO: 1189. In some embodiments, the nucleotide sequence of the antisense strand differs by no more than 3 (e.g., 0, 1, 2, or 3) nucleotides from the nucleotide sequence set forth in SEQ ID NO: 1189. In some embodiments, the nucleotide sequence of the antisense strand differs by no more than 2 (e.g., 0, 1, or 2) nucleotides from the nucleotide sequence set forth in SEQ ID NO: 1189. In some embodiments, the nucleotide sequence of the antisense strand differs by no more than 1 (e.g., 0 or 1) nucleotide from the nucleotide sequence set forth in SEQ ID NO: 1189.

[0276] In some embodiments, the nucleotide sequence of the antisense strand comprises the nucleotide sequence set forth in SEQ ID NO: 1189 differing by no more than 5 (e.g., 0, 1, 2, 3, 4, or 5) nucleotides from the nucleotide sequence set forth in SEQ ID NO: 1189. In some embodiments, the nucleotide sequence of the antisense strand comprises the nucleotide sequence set forth in SEQ ID NO: 1189 differing by no more than 3 (e.g., 0, 1, 2, or 3) nucleotides from the nucleotide sequence set forth in SEQ ID NO: 1189. In some embodiments, the nucleotide sequence of the antisense strand comprises the nucleotide sequence set forth in SEQ ID NO: 1189 differing by no more than 2 (e.g., 0, 1, or 2) nucleotides from the nucleotide sequence set forth in SEQ ID NO: 1189. In some embodiments, the nucleotide sequence of the antisense strand comprises the nucleotide sequence set forth in SEQ ID NO: 1189 differing by no more than 1 (e.g., 0 or 1) nucleotide from nucleotide sequence set forth in SEQ ID NO: 1189.

[0277] In some embodiments, the nucleotide sequence of the antisense strand is at least 85%, 86%, 87%, 88%, 89%, 90%, 91%, 92%, 93%, 94%, 95%, 96%, 97%, 98%, 99% or 100% identical to the nucleotide sequence set forth in SEQ ID NO: 1189. In some embodiments, the nucleotide sequence of the antisense strand is at least 90%, 91%, 92%, 93%, 94%, 95%, 96%, 97%, 98%, 99% or 100% identical to the nucleotide sequence set forth in SEQ ID NO: 1189. In some embodiments, the nucleotide sequence of the antisense strand is at least 95%, 96%, 97%, 98%, 99% or 100% identical to the nucleotide sequence set forth in SEQ ID NO: 1189. In some embodiments, the nucleotide sequence of the antisense strand is at least 96%, 97%, 98%, 99% or 100% identical to the nucleotide sequence set forth in SEQ ID NO: 1189. In some embodiments, the nucleotide sequence of the antisense strand is at least 97%, identical to the nucleotide sequence set forth in SEQ ID NO: 1189. In some embodiments, the nucleotide sequence of the antisense strand is at least 98% identical to the nucleotide sequence set forth in SEQ ID NO: 1189. In some embodiments, the nucleotide sequence of the antisense strand is at least 99% identical to the nucleotide sequence set forth in SEQ ID NO: 1189. In some embodiments, the nucleotide sequence of the antisense strand is 100% identical to the nucleotide sequence set forth in SEQ ID NO: 1189.

[0278] In some embodiments, the nucleotide sequence of the antisense strand comprises the nucleotide sequence set forth in SEQ ID NO: 1189. In some embodiments, the nucleotide sequence of the antisense strand consists of the nucleotide sequence set forth in SEQ ID NO: 1189.

[0279] Table 2 or Table 3 further identifies the target nucleic acid molecule within the cited reference CIDEB mRNA transcript (SEQ ID NO: 1) targeted by each of the antisense strands. As such, the disclosure further provides an antisense strand wherein the nucleotide sequence of the antisense strand differs by no more than 5 (e.g., 0, 1, 2, 3, 4, or 5 (e.g., no more than 3 (e.g., 0, 1, 2, or 3))) nucleotides from the nucleotide sequence set forth in SEQ ID NO: 1189 and further comprising additional nucleotide sequences (e.g., comprising from about 1-10, 1-9, 1-8, 1-7, 1-6, 1-5, 1-4, 1-3, or 1-2 nucleotides) at least partially complementary to the region contiguous (e.g., either at the 3′ end, the 5′ end, or both the 3′ and 5′ end) of the CIDEB mRNA transcript targeted by the select antisense strand.

[0280] In some embodiments, the antisense strand comprises at least 15 (e.g., 15, 16, 17, 18, 19, 20, 21, 22, 23, 24, 25, 26, 27, 28, 29, 30 (e.g., 19, 20, 21, 22, 23 (e.g., 23))) contiguous nucleotides differing by no more than 3 (e.g., 0, 1, 2, or 3) nucleotides from the nucleotide sequence set forth in SEQ ID NO: 1189. In some embodiments, the antisense strand comprises at least 19 (e.g., 20, 21, 22, 23, 24, 25, 26, 27, 28, 29, 30 (e.g., 19, 20, 21, 22, 23 (e.g., 23))) contiguous nucleotides differing by no more than 3 (e.g., 0, 1, 2, or 3) nucleotides from the nucleotide sequence of any one of the antisense strands set forth in SEQ ID NO: 1189. In some embodiments, the antisense strand comprises at least 21 (e.g., 22, 23, 24, 25, 26, 27, 28, 29, 30 (e.g., 21, 22, 23 (e.g., 23))) contiguous nucleotides differing by no more than 3 (e.g., 0, 1, 2, or 3) nucleotides from the nucleotide sequence set forth in SEQ ID NO: 1189. In some embodiments, the antisense strand comprises at least 23 (e.g., 24, 25, 26, 27, 28, 29, 30) contiguous nucleotides differing by no more than 3 (e.g., 0, 1, 2, or 3) nucleotides from the nucleotide sequence set forth in SEQ ID NO: 1189.

[0281] In some embodiments, the antisense strand comprises from about 15-23 (e.g., 15-22, 15-21, 15-20, 15-19, 15-18, 15-17, 15-16, 16-22, 16-20, 16-19, 16-18, 16-17, 17-23, 17-22, 17-21, 17-20, 17-19, 17-18, 18-23, 18-22, 18-21, 18-20, 18-19, 19-23, 19-22, 19-21, 19-20, 20-23, 20-22, 20-21, 21-23, 21-22, 22-23) contiguous nucleotides differing by no more than 3 (e.g., 0, 1, 2, or 3) nucleotides from the nucleotide sequence set forth in SEQ ID NO: 1189. In some embodiments, the antisense strand comprises from about 19-23 (e.g., 19-22, 19-21, 19-20, 20-23, 20-22, 20-21, 21-23, 21-22, 22-23) contiguous nucleotides differing by no more than 3 (e.g., 0, 1, 2, or 3) nucleotides from the nucleotide sequence set forth in SEQ ID NO: 1189. In some embodiments, the antisense strand comprises from about 21-23 (e.g., 21-22, 22-23) contiguous nucleotides differing by no more than 3 (e.g., 0, 1, 2, or 3) nucleotides from the nucleotide sequence set forth in SEQ ID NO: 1189.

[0282] In some embodiments, the nucleotide sequence of the antisense strand comprises the nucleotide sequence set forth in SEQ ID NO: 1189 differing by no more than 3 (e.g., 0, 1, 2, or 3) nucleotides from the nucleotide sequence set forth in any one of SEQ ID NOS: 1189. In some embodiments, the nucleotide sequence of the antisense strand comprises the nucleotide sequence set forth in SEQ ID NO: 1189.

[0283] As described above, Table 2 or Table 3 further identifies the target nucleic acid molecule within the cited reference CIDEB mRNA transcript (SEQ ID NO: 1) targeted by each of the antisense strands. The disclosure further provides antisense strands comprising at least 15 (e.g., 15, 16, 17, 18, 19, 20, 21, 22, 23, 24, 25, 26, 27, 28, 29, 30 (e.g., 19, 20, 21, 22, 23 (e.g., 23))) contiguous nucleotides differing by no more than 3 (e.g., 0, 1, 2, or 3) nucleotides from the nucleotide sequence set forth in SEQ ID NO: 1189 and further comprising additional nucleotide sequences (e.g., comprising from about 1-10, 1-9, 1-8, 1-7, 1-6, 1-5, 1-4, 1-3, or 1-2 nucleotides) at least partially complementary to the region contiguous (e.g., either at the 3′ end, the 5′ end, or both the 3′ and 5′ end) of the CIDEB mRNA transcript targeted by the select antisense strand.

[0284] In some embodiments, the nucleotide sequence of the antisense strand differs by no more than 5 (e.g., 0, 1, 2, 3, 4, or 5) nucleotides from the nucleotide sequence set forth in SEQ ID NO: 1062. In some embodiments, the nucleotide sequence of the antisense strand differs by no more than 3 (e.g., 0, 1, 2, or 3) nucleotides from the nucleotide sequence set forth in SEQ ID NO: 1062. In some embodiments, the nucleotide sequence of the antisense strand differs by no more than 2 (e.g., 0, 1, or 2) nucleotides from the nucleotide sequence set forth in SEQ ID NO: 1062. In some embodiments, the nucleotide sequence of the antisense strand differs by no more than 1 (e.g., 0 or 1) nucleotide from the nucleotide sequence set forth in SEQ ID NO: 1062.

[0285] In some embodiments, the nucleotide sequence of the antisense strand comprises the nucleotide sequence set forth in SEQ ID NO: 1062 differing by no more than 5 (e.g., 0, 1, 2, 3, 4, or 5) nucleotides from the nucleotide sequence set forth in SEQ ID NO: 1062. In some embodiments, the nucleotide sequence of the antisense strand comprises the nucleotide sequence set forth in SEQ ID NO: 1062 differing by no more than 3 (e.g., 0, 1, 2, or 3) nucleotides from the nucleotide sequence set forth in SEQ ID NO: 1062. In some embodiments, the nucleotide sequence of the antisense strand comprises the nucleotide sequence set forth in SEQ ID NO: 1062 differing by no more than 2 (e.g., 0, 1, or 2) nucleotides from the nucleotide sequence set forth in SEQ ID NO: 1062. In some embodiments, the nucleotide sequence of the antisense strand comprises the nucleotide sequence set forth in SEQ ID NO: 1062 differing by no more than 1 (e.g., 0 or 1) nucleotide from nucleotide sequence set forth in SEQ ID NO: 1062.

[0286] In some embodiments, the nucleotide sequence of the antisense strand is at least 85%, 86%, 87%, 88%, 89%, 90%, 91%, 92%, 93%, 94%, 95%, 96%, 97%, 98%, 99% or 100% identical to the nucleotide sequence set forth in SEQ ID NO: 1062. In some embodiments, the nucleotide sequence of the antisense strand is at least 90%, 91%, 92%, 93%, 94%, 95%, 96%, 97%, 98%, 99% or 100% identical to the nucleotide sequence set forth in SEQ ID NO: 1062. In some embodiments, the nucleotide sequence of the antisense strand is at least 95%, 96%, 97%, 98%, 99% or 100% identical to the nucleotide sequence set forth in SEQ ID NO: 1062. In some embodiments, the nucleotide sequence of the antisense strand is at least 96%, 97%, 98%, 99% or 100% identical to the nucleotide sequence set forth in SEQ ID NO: 1062. In some embodiments, the nucleotide sequence of the antisense strand is at least 97%, identical to the nucleotide sequence set forth in SEQ ID NO: 1062. In some embodiments, the nucleotide sequence of the antisense strand is at least 98% identical to the nucleotide sequence set forth in SEQ ID NO: 1062. In some embodiments, the nucleotide sequence of the antisense strand is at least 99% identical to the nucleotide sequence set forth in SEQ ID NO: 1062. In some embodiments, the nucleotide sequence of the antisense strand is 100% identical to the nucleotide sequence set forth in SEQ ID NO: 1062.

[0287] In some embodiments, the nucleotide sequence of the antisense strand comprises the nucleotide sequence set forth in SEQ ID NO: 1062. In some embodiments, the nucleotide sequence of the antisense strand consists of the nucleotide sequence set forth in SEQ ID NO: 1062.

[0288] Table 2 or Table 3 further identifies the target nucleic acid molecule within the cited reference CIDEB mRNA transcript (SEQ ID NO: 1) targeted by each of the antisense strands. As such, the disclosure further provides an antisense strand wherein the nucleotide sequence of the antisense strand differs by no more than 5 (e.g., 0, 1, 2, 3, 4, or 5 (e.g., no more than 3 (e.g., 0, 1, 2, or 3))) nucleotides from the nucleotide sequence set forth in SEQ ID NO: 1062 and further comprising additional nucleotide sequences (e.g., comprising from about 1-10, 1-9, 1-8, 1-7, 1-6, 1-5, 1-4, 1-3, or 1-2 nucleotides) at least partially complementary to the region contiguous (e.g., either at the 3′ end, the 5′ end, or both the 3′ and 5′ end) of the CIDEB mRNA transcript targeted by the select antisense strand.

[0289] In some embodiments, the antisense strand comprises at least 15 (e.g., 15, 16, 17, 18, 19, 20, 21, 22, 23, 24, 25, 26, 27, 28, 29, 30 (e.g., 19, 20, 21, 22, 23 (e.g., 23))) contiguous nucleotides differing by no more than 3 (e.g., 0, 1, 2, or 3) nucleotides from the nucleotide sequence set forth in SEQ ID NO: 1062. In some embodiments, the antisense strand comprises at least 19 (e.g., 20, 21, 22, 23, 24, 25, 26, 27, 28, 29, 30 (e.g., 19, 20, 21, 22, 23 (e.g., 23))) contiguous nucleotides differing by no more than 3 (e.g., 0, 1, 2, or 3) nucleotides from the nucleotide sequence of any one of the antisense strands set forth in SEQ ID NO: 1062. In some embodiments, the antisense strand comprises at least 21 (e.g., 22, 23, 24, 25, 26, 27, 28, 29, 30 (e.g., 21, 22, 23 (e.g., 23))) contiguous nucleotides differing by no more than 3 (e.g., 0, 1, 2, or 3) nucleotides from the nucleotide sequence set forth in SEQ ID NO: 1062. In some embodiments, the antisense strand comprises at least 23 (e.g., 24, 25, 26, 27, 28, 29, 30) contiguous nucleotides differing by no more than 3 (e.g., 0, 1, 2, or 3) nucleotides from the nucleotide sequence set forth in SEQ ID NO: 1062.

[0290] In some embodiments, the antisense strand comprises from about 15-23 (e.g., 15-22, 15-21, 15-20, 15-19, 15-18, 15-17, 15-16, 16-22, 16-20, 16-19, 16-18, 16-17, 17-23, 17-22, 17-21, 17-20, 17-19, 17-18, 18-23, 18-22, 18-21, 18-20, 18-19, 19-23, 19-22, 19-21, 19-20, 20-23, 20-22, 20-21, 21-23, 21-22, 22-23) contiguous nucleotides differing by no more than 3 (e.g., 0, 1, 2, or 3) nucleotides from the nucleotide sequence set forth in SEQ ID NO: 1062. In some embodiments, the antisense strand comprises from about 19-23 (e.g., 19-22, 19-21, 19-20, 20-23, 20-22, 20-21, 21-23, 21-22, 22-23) contiguous nucleotides differing by no more than 3 (e.g., 0, 1, 2, or 3) nucleotides from the nucleotide sequence set forth in SEQ ID NO: 1062. In some embodiments, the antisense strand comprises from about 21-23 (e.g., 21-22, 22-23) contiguous nucleotides differing by no more than 3 (e.g., 0, 1, 2, or 3) nucleotides from the nucleotide sequence set forth in SEQ ID NO: 1062.

[0291] In some embodiments, the nucleotide sequence of the antisense strand comprises the nucleotide sequence set forth in SEQ ID NO: 1062 differing by no more than 3 (e.g., 0, 1, 2, or 3) nucleotides from the nucleotide sequence set forth in any one of SEQ ID NOS: 1062. In some embodiments, the nucleotide sequence of the antisense strand comprises the nucleotide sequence set forth in SEQ ID NO: 1062.

[0292] As described above, Table 2 or Table 3 further identifies the target nucleic acid molecule within the cited reference CIDEB mRNA transcript (SEQ ID NO: 1) targeted by each of the antisense strands. The disclosure further provides antisense strands comprising at least 15 (e.g., 15, 16, 17, 18, 19, 20, 21, 22, 23, 24, 25, 26, 27, 28, 29, 30 (e.g., 19, 20, 21, 22, 23 (e.g., 23))) contiguous nucleotides differing by no more than 3 (e.g., 0, 1, 2, or 3) nucleotides from the nucleotide sequence set forth in SEQ ID NO: 1062 and further comprising additional nucleotide sequences (e.g., comprising from about 1-10, 1-9, 1-8, 1-7, 1-6, 1-5, 1-4, 1-3, or 1-2 nucleotides) at least partially complementary to the region contiguous (e.g., either at the 3′ end, the 5′ end, or both the 3′ and 5′ end) of the CIDEB mRNA transcript targeted by the select antisense strand.

[0293] In some embodiments, the nucleotide sequence of the antisense strand differs by no more than 5 (e.g., 0, 1, 2, 3, 4, or 5) nucleotides from the nucleotide sequence of any one of the antisense strands of any one of dsRNA agents 1-482. In some embodiments, the nucleotide sequence of the antisense strand differs by no more than 3 (e.g., 0, 1, 2, or 3) nucleotides from the nucleotide sequence of any one of the antisense strands of any one of dsRNA agents 1-482. In some embodiments, the nucleotide sequence of the antisense strand differs by no more than 2 (e.g., 0, 1, or 2) nucleotides from the nucleotide sequence of any one of the antisense strands of any one of dsRNA agents 1-482. In some embodiments, the nucleotide sequence of the antisense strand differs by no more than 1 (e.g., 0 or 1) nucleotide from the nucleotide sequence of any one of the antisense strands of any one of dsRNA agents 1-482.

[0294] In some embodiments, the nucleotide sequence of the antisense strand comprises the nucleotide sequence of any one of the antisense strands of any one of dsRNA agents 1-482 differing by no more than 5 (e.g., 0, 1, 2, 3, 4, or 5) nucleotides from the antisense strand of any one of dsRNA agents 1-482. In some embodiments, the nucleotide sequence of the antisense strand comprises the nucleotide sequence of any one of the antisense strands of any one of dsRNA agents 1-482 differing by no more than 3 (e.g., 0, 1, 2, or 3) nucleotides from the antisense strand of any one of dsRNA agents 1-482. In some embodiments, the nucleotide sequence of the antisense strand comprises the nucleotide sequence of any one of the antisense strands of any one of dsRNA agents 1-482 differing by no more than 2 (e.g., 0, 1, or 2) nucleotides from the antisense strand of any one of dsRNA agents 1-482. In some embodiments, the nucleotide sequence of the antisense strand comprises the nucleotide sequence of any one of the antisense strands of any one of dsRNA agents 1-482 differing by no more than 1 (e.g., 0 or 1) nucleotide from the antisense strand of any one of dsRNA agents 1-482.

[0295] In some embodiments, the nucleotide sequence of the antisense strand is at least 85%, 86%, 87%, 88%, 89%, 90%, 91%, 92%, 93%, 94%, 95%, 96%, 97%, 98%, 99% or 100% identical to the nucleotide sequence of any one of the antisense strands of any one of dsRNA agents 1-482. In some embodiments, the nucleotide sequence of the antisense strand is at least 90%, 91%, 92%, 93%, 94%, 95%, 96%, 97%, 98%, 99% or 100% identical to the nucleotide sequence of any one of the antisense strands of any one of dsRNA agents 1-482. In some embodiments, the nucleotide sequence of the antisense strand is at least 95%, 96%, 97%, 98%, 99% or 100% identical to the nucleotide sequence of any one of the antisense strands of any one of dsRNA agents 1-482. In some embodiments, the nucleotide sequence of the antisense strand is at least 96%, 97%, 98%, 99% or 100% identical to the nucleotide sequence of any one of the antisense strands of any one of dsRNA agents 1-482. In some embodiments, the nucleotide sequence of the antisense strand is at least 97%, identical to the nucleotide sequence of any one of the antisense strands of any one of dsRNA agents 1-482. In some embodiments, the nucleotide sequence of the antisense strand is at least 98% identical to the nucleotide sequence of any one of the antisense strands of any one of dsRNA agents 1-482. In some embodiments, the nucleotide sequence of the antisense strand is at least 99% identical to the nucleotide sequence of any one of the antisense strands of any one of dsRNA agents 1-482. In some embodiments, the nucleotide sequence of the antisense strand is 100% identical to the nucleotide sequence of any one of the antisense strands of any one of dsRNA agents 1-482.

[0296] In some embodiments, the nucleotide sequence of the antisense strand comprises the nucleotide sequence of any one of the antisense strands of any one of dsRNA agents 1-482. In some embodiments, the nucleotide sequence of the antisense strand consists of the nucleotide sequence of any one of the antisense strands of any one of dsRNA agents 1-482.

[0297] Table 2 or Table 3 further identifies the target nucleic acid molecule within the cited reference CIDEB mRNA transcript (SEQ ID NO: 1) targeted by each of the antisense strands. As such, the disclosure further provides antisense strands wherein the nucleotide sequence of the antisense strand differs by no more than 5 (e.g., 0, 1, 2, 3, 4, or 5 (e.g., no more than 3 (e.g., 0, 1, 2, or 3))) nucleotides from the nucleotide sequence of any one of the antisense strands of any one of dsRNA agents 1-482 and further comprising additional nucleotide sequences (e.g., comprising from about 1-10, 1-9, 1-8, 1-7, 1-6, 1-5, 1-4, 1-3, or 1-2 nucleotides) at least partially complementary to the region contiguous (e.g., either at the 3′ end, the 5′ end, or both the 3′ and 5′ end) of the CIDEB mRNA transcript targeted by the select antisense strand.

[0298] In some embodiments, the antisense strand comprises at least 15 (e.g., 15, 16, 17, 18, 19, 20, 21, 22, 23, 24, 25, 26, 27, 28, 29, 30 (e.g., 19, 20, 21, 22, 23 (e.g., 23))) contiguous nucleotides differing by no more than 3 (e.g., 0, 1, 2, or 3) nucleotides from the nucleotide sequence of any one of the antisense strands of any one of dsRNA agents 1-482. In some embodiments, the antisense strand comprises at least 19 (e.g., 20, 21, 22, 23, 24, 25, 26, 27, 28, 29, 30 (e.g., 19, 20, 21, 22, 23 (e.g., 23))) contiguous nucleotides differing by no more than 3 (e.g., 0, 1, 2, or 3) nucleotides from the nucleotide sequence of any one of the antisense strands of any one of dsRNA agents 1-482. In some embodiments, the antisense strand comprises at least 21 (e.g., 22, 23, 24, 25, 26, 27, 28, 29, 30 (e.g., 21, 22, 23 (e.g., 23))) contiguous nucleotides differing by no more than 3 (e.g., 0, 1, 2, or 3) nucleotides from the nucleotide sequence of any one of the antisense strands of any one of dsRNA agents 1-482. In some embodiments, the antisense strand comprises at least 23 (e.g., 24, 25, 26, 27, 28, 29, 30) contiguous nucleotides differing by no more than 3 (e.g., 0, 1, 2, or 3) nucleotides from the nucleotide sequence of any one of the antisense strands of any one of dsRNA agents 1-482.

[0299] In some embodiments, the antisense strand comprises from about 15-23 (e.g., 15-22, 15-21, 15-20, 15-19, 15-18, 15-17, 15-16, 16-22, 16-20, 16-19, 16-18, 16-17, 17-23, 17-22, 17-21, 17-20, 17-19, 17-18, 18-23, 18-22, 18-21, 18-20, 18-19, 19-23, 19-22, 19-21, 19-20, 20-23, 20-22, 20-21, 21-23, 21-22, 22-23) contiguous nucleotides differing by no more than 3 (e.g., 0, 1, 2, or 3) nucleotides from the nucleotide sequence of any one of the antisense strands of any one of dsRNA agents 1-482. In some embodiments, the antisense strand comprises from about 19-23 (e.g., 19-22, 19-21, 19-20, 20-23, 20-22, 20-21, 21-23, 21-22, 22-23) contiguous nucleotides differing by no more than 3 (e.g., 0, 1, 2, or 3) nucleotides from the nucleotide sequence of any one of the antisense strands of any one of dsRNA agents 1-482. In some embodiments, the antisense strand comprises from about 21-23 (e.g., 21-22, 22-23) contiguous nucleotides differing by no more than 3 (e.g., 0, 1, 2, or 3) nucleotides from the nucleotide sequence of any one of the antisense strands of any one of dsRNA agents 1-482.

[0300] In some embodiments, the nucleotide sequence of the antisense strand comprises the nucleotide sequence of any one of the antisense strands of any one of dsRNA agents 1-482 differing by no more than 3 (e.g., 0, 1, 2, or 3) nucleotides from the antisense strand. In some embodiments, the nucleotide sequence of the antisense strand comprises the nucleotide sequence of any one of the antisense strands of any one of dsRNA agents 1-482.

[0301] As described above, Table 2 or Table 3 further identifies the target nucleic acid molecule within the cited reference CIDEB mRNA transcript (SEQ ID NO: 1) targeted by each of the antisense strands. The disclosure further provides antisense strands comprising at least 15 (e.g., 15, 16, 17, 18, 19, 20, 21, 22, 23, 24, 25, 26, 27, 28, 29, 30 (e.g., 19, 20, 21, 22, 23 (e.g., 23))) contiguous nucleotides differing by no more than 3 (e.g., 0, 1, 2, or 3) nucleotides from the nucleotide sequence of any one of the antisense strands of any one of dsRNA agents 1-482 and further comprising additional nucleotide sequences (e.g., comprising from about 1-10, 1-9, 1-8, 1-7, 1-6, 1-5, 1-4, 1-3, or 1-2 nucleotides) at least partially complementary to the region contiguous (e.g., either at the 3′ end, the 5′ end, or both the 3′ and 5′ end) of the CIDEB mRNA transcript targeted by the select antisense strand.

[0302] In some embodiments, the nucleotide sequence of the antisense strand differs by no more than 5 (e.g., 0, 1, 2, 3, 4, or 5) nucleotides from the nucleotide sequence of any one of the antisense strands of any one of dsRNA agents 129, 135, 169, 170, 409, 479, 480, 481, or 482. In some embodiments, the nucleotide sequence of the antisense strand differs by no more than 3 (e.g., 0, 1, 2, or 3) nucleotides from the nucleotide sequence of any one of the antisense strands of any one of dsRNA agents 129, 135, 169, 170, 409, 479, 480, 481, or 482. In some embodiments, the nucleotide sequence of the antisense strand differs by no more than 2 (e.g., 0, 1, or 2) nucleotides from the nucleotide sequence of any one of the antisense strands of any one of dsRNA agents 129, 135, 169, 170, 409, 479, 480, 481, or 482. In some embodiments, the nucleotide sequence of the antisense strand differs by no more than 1 (e.g., 0 or 1) nucleotide from the nucleotide sequence of any one of the antisense strands of any one of dsRNA agents 129, 135, 169, 170, 409, 479, 480, 481, or 482.

[0303] In some embodiments, the nucleotide sequence of the antisense strand comprises the nucleotide sequence of any one of the antisense strands of any one of dsRNA agents 129, 135, 169, 170, 409, 479, 480, 481, or 482 differing by no more than 5 (e.g., 0, 1, 2, 3, 4, or 5) nucleotides from the antisense strand of any one of dsRNA agents 129, 135, 169, 170, 409, 479, 480, 481, or 482. In some embodiments, the nucleotide sequence of the antisense strand comprises the nucleotide sequence of any one of the antisense strands of any one of dsRNA agents 129, 135, 169, 170, 409, 479, 480, 481, or 482 differing by no more than 3 (e.g., 0, 1, 2, or 3) nucleotides from the antisense strand of any one of dsRNA agents 129, 135, 169, 170, 409, 479, 480, 481, or 482. In some embodiments, the nucleotide sequence of the antisense strand comprises the nucleotide sequence of any one of the antisense strands of any one of dsRNA agents 129, 135, 169, 170, 409, 479, 480, 481, or 482 differing by no more than 2 (e.g., 0, 1, or 2) nucleotides from the antisense strand of any one of dsRNA agents 129, 135, 169, 170, 409, 479, 480, 481, or 482. In some embodiments, the nucleotide sequence of the antisense strand comprises the nucleotide sequence of any one of the antisense strands of any one of dsRNA agents 129, 135, 169, 170, 409, 479, 480, 481, or 482 differing by no more than 1 (e.g., 0 or 1) nucleotide from the antisense strand of any one of dsRNA agents 129, 135, 169, 170, 409, 479, 480, 481, or 482.

[0304] In some embodiments, the nucleotide sequence of the antisense strand is at least 85%, 86%, 87%, 88%, 89%, 90%, 91%, 92%, 93%, 94%, 95%, 96%, 97%, 98%, 99% or 100% identical to the nucleotide sequence of any one of the antisense strands of any one of dsRNA agents 129, 135, 169, 170, 409, 479, 480, 481, or 482. In some embodiments, the nucleotide sequence of the antisense strand is at least 90%, 91%, 92%, 93%, 94%, 95%, 96%, 97%, 98%, 99% or 100% identical to the nucleotide sequence of any one of the antisense strands of any one of dsRNA agents 129, 135, 169, 170, 409, 479, 480, 481, or 482. In some embodiments, the nucleotide sequence of the antisense strand is at least 95%, 96%, 97%, 98%, 99% or 100% identical to the nucleotide sequence of any one of the antisense strands of any one of dsRNA agents 129, 135, 169, 170, 409, 479, 480, 481, or 482. In some embodiments, the nucleotide sequence of the antisense strand is at least 96%, 97%, 98%, 99% or 100% identical to the nucleotide sequence of any one of the antisense strands of any one of dsRNA agents 129, 135, 169, 170, 409, 479, 480, 481, or 482. In some embodiments, the nucleotide sequence of the antisense strand is at least 97%, identical to the nucleotide sequence of any one of the antisense strands of any one of dsRNA agents 129, 135, 169, 170, 409, 479, 480, 481, or 482. In some embodiments, the nucleotide sequence of the antisense strand is at least 98% identical to the nucleotide sequence of any one of the antisense strands of any one of dsRNA agents 129, 135, 169, 170, 409, 479, 480, 481, or 482. In some embodiments, the nucleotide sequence of the antisense strand is at least 99% identical to the nucleotide sequence of any one of the antisense strands of any one of dsRNA agents 129, 135, 169, 170, 409, 479, 480, 481, or 482. In some embodiments, the nucleotide sequence of the antisense strand is 100% identical to the nucleotide sequence of any one of the antisense strands of any one of dsRNA agents 129, 135, 169, 170, 409, 479, 480, 481, or 482.

[0305] In some embodiments, the nucleotide sequence of the antisense strand comprises the nucleotide sequence of any one of the antisense strands of any one of dsRNA agents 129, 135, 169, 170, 409, 479, 480, 481, or 482. In some embodiments, the nucleotide sequence of the antisense strand consists of the nucleotide sequence of any one of the antisense strands of any one of dsRNA agents 129, 135, 169, 170, 409, 479, 480, 481, or 482.

[0306] Table 2 or Table 3 further identifies the target nucleic acid molecule within the cited reference CIDEB mRNA transcript (SEQ ID NO: 1) targeted by each of the antisense strands. As such, the disclosure further provides antisense strands wherein the nucleotide sequence of the antisense strand differs by no more than 5 (e.g., 0, 1, 2, 3, 4, or 5 (e.g., no more than 3 (e.g., 0, 1, 2, or 3))) nucleotides from the nucleotide sequence of any one of the antisense strands of any one of dsRNA agents 129, 135, 169, 170, 409, 479, 480, 481, or 482 and further comprising additional nucleotide sequences (e.g., comprising from about 1-10, 1-9, 1-8, 1-7, 1-6, 1-5, 1-4, 1-3, or 1-2 nucleotides) at least partially complementary to the region contiguous (e.g., either at the 3′ end, the 5′ end, or both the 3′ and 5′ end) of the CIDEB mRNA transcript targeted by the select antisense strand.

[0307] In some embodiments, the antisense strand comprises at least 15 (e.g., 15, 16, 17, 18, 19, 20, 21, 22, 23, 24, 25, 26, 27, 28, 29, 30 (e.g., 19, 20, 21, 22, 23 (e.g., 23))) contiguous nucleotides differing by no more than 3 (e.g., 0, 1, 2, or 3) nucleotides from the nucleotide sequence of any one of the antisense strands of any one of dsRNA agents 129, 135, 169, 170, 409, 479, 480, 481, or 482. In some embodiments, the antisense strand comprises at least 19 (e.g., 20, 21, 22, 23, 24, 25, 26, 27, 28, 29, 30 (e.g., 19, 20, 21, 22, 23 (e.g., 23))) contiguous nucleotides differing by no more than 3 (e.g., 0, 1, 2, or 3) nucleotides from the nucleotide sequence of any one of the antisense strands of any one of dsRNA agents 129, 135, 169, 170, 409, 479, 480, 481, or 482. In some embodiments, the antisense strand comprises at least 21 (e.g., 22, 23, 24, 25, 26, 27, 28, 29, 30 (e.g., 21, 22, 23 (e.g., 23))) contiguous nucleotides differing by no more than 3 (e.g., 0, 1, 2, or 3) nucleotides from the nucleotide sequence of any one of the antisense strands of any one of dsRNA agents 129, 135, 169, 170, 409, 479, 480, 481, or 482. In some embodiments, the antisense strand comprises at least 23 (e.g., 24, 25, 26, 27, 28, 29, 30) contiguous nucleotides differing by no more than 3 (e.g., 0, 1, 2, or 3) nucleotides from the nucleotide sequence of any one of the antisense strands of any one of dsRNA agents 129, 135, 169, 170, 409, 479, 480, 481, or 482.

[0308] In some embodiments, the antisense strand comprises from about 15-23 (e.g., 15-22, 15-21, 15-20, 15-19, 15-18, 15-17, 15-16, 16-22, 16-20, 16-19, 16-18, 16-17, 17-23, 17-22, 17-21, 17-20, 17-19, 17-18, 18-23, 18-22, 18-21, 18-20, 18-19, 19-23, 19-22, 19-21, 19-20, 20-23, 20-22, 20-21, 21-23, 21-22, 22-23) contiguous nucleotides differing by no more than 3 (e.g., 0, 1, 2, or 3) nucleotides from the nucleotide sequence of any one of the antisense strands of any one of dsRNA agents 129, 135, 169, 170, 409, 479, 480, 481, or 482. In some embodiments, the antisense strand comprises from about 19-23 (e.g., 19-22, 19-21, 19-20, 20-23, 20-22, 20-21, 21-23, 21-22, 22-23) contiguous nucleotides differing by no more than 3 (e.g., 0, 1, 2, or 3) nucleotides from the nucleotide sequence of any one of the antisense strands of any one of dsRNA agents 129, 135, 169, 170, 409, 479, 480, 481, or 482. In some embodiments, the antisense strand comprises from about 21-23 (e.g., 21-22, 22-23) contiguous nucleotides differing by no more than 3 (e.g., 0, 1, 2, or 3) nucleotides from the nucleotide sequence of any one of the antisense strands of any one of dsRNA agents 129, 135, 169, 170, 409, 479, 480, 481, or 482.

[0309] In some embodiments, the nucleotide sequence of the antisense strand comprises the nucleotide sequence of any one of the antisense strands of any one of dsRNA agents 129, 135, 169, 170, 409, 479, 480, 481, or 482 differing by no more than 3 (e.g., 0, 1, 2, or 3) nucleotides from the antisense strand. In some embodiments, the nucleotide sequence of the antisense strand comprises the nucleotide sequence of any one of the antisense strands of any one of dsRNA agents 129, 135, 169, 170, 409, 479, 480, 481, or 482.

[0310] As described above, Table 2 or Table 3 further identifies the target nucleic acid molecule within the cited reference CIDEB mRNA transcript (SEQ ID NO: 1) targeted by each of the antisense strands. The disclosure further provides antisense strands comprising at least 15 (e.g., 15, 16, 17, 18, 19, 20, 21, 22, 23, 24, 25, 26, 27, 28, 29, 30 (e.g., 19, 20, 21, 22, 23 (e.g., 23))) contiguous nucleotides differing by no more than 3 (e.g., 0, 1, 2, or 3) nucleotides from the nucleotide sequence of any one of the antisense strands of any one of dsRNA agents 129, 135, 169, 170, 409, 479, 480, 481, or 482 and further comprising additional nucleotide sequences (e.g., comprising from about 1-10, 1-9, 1-8, 1-7, 1-6, 1-5, 1-4, 1-3, or 1-2 nucleotides) at least partially complementary to the region contiguous (e.g., either at the 3′ end, the 5′ end, or both the 3′ and 5′ end) of the CIDEB mRNA transcript targeted by the select antisense strand.

[0311] It is to be understood, that although the antisense strands set forth in Table 2 or Table 3 are not described as being modified (e.g., comprising chemically modified nucleotides), conjugated, etc., the disclosure includes any antisense strand set forth in Table 2 or Table 3 that is unmodified, unconjugated, modified (e.g., as described herein), or conjugated (e.g., as described herein).

### 4.2.2 Sense Strand

### 4.2.2.1 Antisense Strand Complementarity

[0312] As described above, sense strands (e.g., described herein) comprise a region of complementarity that comprises a nucleotide sequence that is at least partially (e.g., substantially, fully) complementary to the nucleotide sequence of at least a portion of an antisense strand. As such, pairs of sense and antisense strands can hybridize to form a double stranded region (e.g., under conditions in which the pairs will be used).

[0313] In some embodiments, the nucleotide sequence of the region of complementarity is at least substantially complementary to the nucleotide sequence of at least a portion of an antisense strand. In some embodiments, the nucleotide sequence of the region of complementarity is fully complementary to the nucleotide sequence of at least a portion of an antisense strand.

[0314] In some embodiments, the nucleotide sequence of the region of complementarity is at least 70%, 75%, 80%, 85%, 90%, 91%, 92%, 93%, 94%, 95%, 96%, 97%, 98%, 99%, or 100% complementary to the nucleotide sequence of at least a portion of an antisense strand. For example, the nucleotide sequence of the region of complementarity may be at least 70% complementary to the nucleotide sequence of at least a portion of an antisense strand. The nucleotide sequence of the region of complementarity may be at least 75% complementary to the nucleotide sequence of at least a portion of an antisense strand. The nucleotide sequence of the region of complementarity may be at least 80% complementary to the nucleotide sequence of at least a portion of an antisense strand. The nucleotide sequence of the region of complementarity may be at least 85% complementary to the nucleotide sequence of at least a portion of an antisense strand. The nucleotide sequence of the region of complementarity may be at least 90% complementary to the nucleotide sequence of at least a portion of an antisense strand. The nucleotide sequence of the region of complementarity may be at least 95% complementary to the nucleotide sequence of at least a portion of an antisense strand. In some embodiments, the nucleotide sequence of the region of complementarity is at least 80%, 85%, 90%, 91%, 92%, 93%, 94%, 95%, 96%, 97%, 98%, 99%, or 100% complementary to the nucleotide sequence of at least a portion of an antisense strand. In some embodiments, the nucleotide sequence of the region of complementarity is at least 95%, 96%, 97%, 98%, 99%, or 100% complementary to the nucleotide sequence of at least a portion of an antisense strand.

[0315] In some embodiments, the nucleotide sequence of the region of complementarity comprises or consists of one or more non-complementary nucleotide mismatches relative to the nucleotide sequence of the at least a portion of an antisense strand. In some embodiments, the nucleotide sequence of the region of complementarity comprises or consists of no more than 5 (e.g., 4, 3, 2, 1, or 0) non-complementary nucleotide mismatches relative to the nucleotide sequence of the at least a portion of an antisense strand. In some embodiments, the nucleotide sequence of the region of complementarity comprises or consists of no more than 3 (e.g., 2, 1, or 0) non-complementary nucleotide mismatches relative to the nucleotide sequence of the at least a portion of an antisense strand. In some embodiments, the nucleotide sequence of the region of complementarity comprises or consists of no more than 2 (e.g., 1 or 0) non-complementary nucleotide mismatches relative to the nucleotide sequence of the at least a portion of an antisense strand. In some embodiments, the nucleotide sequence of the region of complementarity comprises or consists of no more than 1 (e.g., 0) non-complementary nucleotide mismatches relative to the nucleotide sequence of the at least a portion of an antisense strand. In some embodiments, the nucleotide sequence of the region of complementarity comprises 0 non-complementary nucleotide mismatches relative to the nucleotide sequence of the at least a portion of an antisense strand. In some embodiments, the region of complementarity comprises one or more (e.g., 2, 3, or more) non-complementary nucleotide mismatches relative to the nucleotide sequence of the at least a portion of an antisense strand, wherein the one or more non-complementary nucleotide mismatch is within the last 5 (e.g., 4, 3, 2, or 1) nucleotides from either the 5′- and/or 3′-end of the region of complementarity. In some embodiments, the region of complementarity comprises at least one but not more than 3 (e.g., 1, 2, or 3) non-complementary nucleotide mismatches relative to the nucleotide sequence of the at least a portion of an antisense strand, wherein the one or more non-complementary nucleotide mismatch is within the last 5 (e.g., 4, 3, 2, or 1) nucleotides from either the 5′- and/or 3′-end of the region of complementarity.

[0316] In some embodiments, the region of complementarity comprises from about 15-30 nucleotides, e.g., 15-29, 15-28, 15-27, 15-26, 15-25, 15-24, 15-23, 15-22, 15-21, 15-20, 15-19, 15-18, 15-17, 18-30, 18-29, 18-28, 18-27, 18-26, 18-25, 18-24, 18-23, 18-22, 18-21, 18-20, 19-30, 19-29, 19-28, 19-27, 19-26, 19-25, 19-24, 19-23, 19-22, 19-21, 19-20, 20-30, 20-29, 20-28, 20-27, 20-26, 20-25, 20-24, 20-23, 20-22, 20-21, 21-30, 21-29, 21-28, 21-27, 21-26, 21-25, 21-24, 21-23, or 21-22 nucleotides. In some embodiments, the region of complementarity comprises from about 18-25, 18-24, 18-23, 18-22, 18-21, 18-20, 19-25, 19-24, 19-23, 19-22, 19-21, 19-20, 20-25, 20-24,20-23, 20-22, 20-21, 21-25, 21-24, 21-23, 21-22, 22-25, 22-24, 22-23, 23-25, 23-24 or 24-25 nucleotides. In some embodiments, the region of complementarity comprises from about 19-21 (e.g., 19-20) nucleotides. In some embodiments, the region of complementarity comprises or consists of about 15, 16, 17, 18, 19, 20, 21, 22, 23, 24, 25, 26, 27, 28, 29, or 30 nucleotides. In some embodiments, the region of complementarity comprises or consists of about 19, 20, or 21 nucleotides. In some embodiments, the region of complementarity comprises or consists of about 19 nucleotides. In some embodiments, the region of complementarity comprises or consists of about 20 nucleotides. In some embodiments, the region of complementarity comprises or consists of about 21 nucleotides. Ranges and lengths intermediate to the above recited ranges and lengths are also contemplated to be part of the disclosure.

### 4.2.2.2 Overall Length

[0317] In some embodiments, the sense strand comprises or consists of from about 15-30 nucleotides (e.g., 15-29, 15-28, 15-27, 15-26, 15-25, 15-24, 15-23, 15-22, 15-21, 15-20, 15-19, 15-18, 15-17, 18-30, 18-29, 18-28, 18-27, 18-26, 18-25, 18-24, 18-23, 18-22, 18-21, 18-20, 19-30, 19-29, 19-28, 19-27, 19-26, 19-25, 19-24, 19-23, 19-22, 19-21, 19-20, 20-30, 20-29, 20-28, 20-27, 20-26, 20-25, 20-24, 20-23, 20-22, 20-21, 21-30, 21-29, 21-28, 21-27, 21-26, 21-25, 21-24, 21-23, or 21-22 nucleotides). In some embodiments, the sense strand comprises or consists of from about 18-25 nucleotides (e.g., 18-24, 18-23, 18-22, 18-21, 18-20, 19-25, 19-24, 19-23, 19-22, 19-21, 19-20, 20-25, 20-24, 20-23, 20-22, 20-21, 21-25, 21-24, 21-23, 21-22, 22-25, 22-24, 22-23, 23-25, 23-24 or 24-25 nucleotides). In some embodiments, the sense strand comprises or consists of from about 19-25 nucleotide (e.g., 19-20, 19-21, 19-22, 19-23, 19-24, 19-25, 20-21, 20-22, 20-23, 20-24, 20-25, 21-22, 21-23, 21-24, 21-25, 22-23, 22-24, 22-25, 23-24, 23-25, 24-25 nucleotides). In some embodiments, the sense strand comprises or consists of from about 15-30, 16-30, 17-30, 18-30, 19-30 20-30, 21-30, 22-30, 23-30, 24-30, 25-30, 36-30, 27-30, 28-30-, 29-30, 19-20, 19-21, 19-22, 19-23, 19-24, or 19-25 nucleotides.

[0318] In some embodiments, the sense strand comprises or consists of not more than about 15, 16, 17, 18, 19, 20, 21, 22, 23, 24, 25, 26, 27, 28, 29, or 30 nucleotides. In some embodiments, the sense strand comprises or consists of about 15, 16, 17, 18, 19, 20, 21, 22, 23, 24, 25, 26, 27, 28, 29, or 30 nucleotides. In some embodiments, the sense strand comprises or consists of about 19, 20, 21, 22, 23 nucleotides. In some embodiments, the sense strand comprises or consists of about 19, 20, 21 nucleotides. In some embodiments, the sense strand comprises or consists of about 20 nucleotides. In some embodiments, the sense strand comprises or consists of about 21 nucleotides. In some embodiments, the sense strand comprises or consists of about 21 nucleotides. In some embodiments, the sense strand comprises or consists of about 23 nucleotides. Ranges and lengths intermediate to the above recited ranges and lengths are also contemplated to be part of the disclosure.

### 4.2.2.3 Exemplary Sense Strands

[0319] In some embodiments, the nucleotide sequence of the sense strand differs by no more than 5 (e.g., 0, 1, 2, 3, 4, or 5) nucleotides from the nucleotide sequence of any one of the sense strands set forth in Table 2 or Table 3. In some embodiments, the nucleotide sequence of the sense strand differs by no more than 3 (e.g., 0, 1, 2, or 3) nucleotides from the nucleotide sequence of any one of the sense strands set forth in Table 2 or Table 3. In some embodiments, the nucleotide sequence of the sense strand differs by no more than 2 (e.g., 0, 1, or 2) nucleotides from the nucleotide sequence of any one of the sense strands set forth in Table 2 or Table 3. In some embodiments, the nucleotide sequence of the sense strand differs by no more than 1 (e.g., 0 or 1) nucleotide from the nucleotide sequence of any one of the sense strands set forth in Table 2 or Table 3.

[0320] In some embodiments, the nucleotide sequence of the sense strand comprises the nucleotide sequence of any one of the sense strands set forth in Table 2 or Table 3 differing by no more than 5 (e.g., 0, 1, 2, 3, 4, or 5) nucleotides from the sense strand set forth in Table 2 or Table 3. In some embodiments, the nucleotide sequence of the sense strand comprises the nucleotide sequence of any one of the sense strands set forth in Table 2 or Table 3 differing by no more than 3 (e.g., 0, 1, 2, or 3) nucleotides from the sense strand set forth in Table 2 or Table 3. In some embodiments, the nucleotide sequence of the sense strand comprises the nucleotide sequence of any one of the sense strands set forth in Table 2 or Table 3 differing by no more than 2 (e.g., 0, 1, or 2) nucleotides from the sense strand set forth in Table 2 or Table 3. In some embodiments, the nucleotide sequence of the sense strand comprises the nucleotide sequence of any one of the sense strands set forth in Table 2 or Table 3 differing by no more than 1 (e.g., 0 or 1) nucleotide from the sense strand set forth in Table 2 or Table 3.

[0321] In some embodiments, the nucleotide sequence of the sense strand is at least 85%, 86%, 87%, 88%, 89%, 90%, 91%, 92%, 93%, 94%, 95%, 96%, 97%, 98%, 99% or 100% identical to the nucleotide sequence of any one of the sense strands set forth in Table 2 or Table 3. In some embodiments, the nucleotide sequence of the sense strand is at least 90%, 91%, 92%, 93%, 94%, 95%, 96%, 97%, 98%, 99% or 100% identical to the nucleotide sequence of any one of the sense strands set forth in Table 2 or Table 3. In some embodiments, the nucleotide sequence of the sense strand is at least 95%, 96%, 97%, 98%, 99% or 100% identical to the nucleotide sequence of any one of the sense strands set forth in Table 2 or Table 3. In some embodiments, the nucleotide sequence of the sense strand is at least 96%, 97%, 98%, 99% or 100% identical to the nucleotide sequence of any one of the sense strands set forth in Table 2 or Table 3. In some embodiments, the nucleotide sequence of the sense strand is at least 97%, identical to the nucleotide sequence of any one of the sense strands set forth in Table 2 or Table 3. In some embodiments, the nucleotide sequence of the sense strand is at least 98% identical to the nucleotide sequence of any one of the sense strands set forth in Table 2 or Table 3. In some embodiments, the nucleotide sequence of the sense strand is at least 99% identical to the nucleotide sequence of any one of the sense strands set forth in Table 2 or Table 3. In some embodiments, the nucleotide sequence of the sense strand is 100% identical to the nucleotide sequence of any one of the sense strands set forth in Table 2 or Table 3.

[0322] In some embodiments, the nucleotide sequence of the sense strand comprises the nucleotide sequence of any one of the sense strands set forth in Table 2 or Table 3. In some embodiments, the nucleotide sequence of the sense strand consists of the nucleotide sequence of any one of the sense strands set forth in Table 2 or Table 3.

[0323] Table 2 or Table 3 further identifies the target nucleic acid molecule within the cited reference CIDEB mRNA transcript (SEQ ID NO: 1) targeted by each of the sense strands. As such, the disclosure further provides sense strands wherein the nucleotide sequence of the sense strand differs by no more than 5 (e.g., 0, 1, 2, 3, 4, or 5 (e.g., no more than 3 (e.g., 0, 1, 2, or 3))) nucleotides from the nucleotide sequence of any one of the sense strands set forth in Table 2 or Table 3 and further comprising additional nucleotide sequences (e.g., comprising from about 1-10, 1-9, 1-8, 1-7, 1-6, 1-5, 1-4, 1-3, or 1-2 nucleotides) at least partially complementary to the region contiguous (e.g., either at the 3′ end, the 5′ end, or both the 3′ and 5′ end) of the CIDEB mRNA transcript targeted by the select sense strand.

[0324] In some embodiments, the sense strand comprises at least 15 (e.g., 15, 16, 17, 18, 19, 20, 21, 22, 23, 24, 25, 26, 27, 28, 29, 30 (e.g., 19, 20, 21, 22, 23 (e.g., 23))) contiguous nucleotides differing by no more than 3 (e.g., 0, 1, 2, or 3) nucleotides from the nucleotide sequence of any one of the sense strands set forth in Table 2 or Table 3. In some embodiments, the sense strand comprises at least 19 (e.g., 20, 21, 22, 23, 24, 25, 26, 27, 28, 29, 30 (e.g., 19, 20, 21, 22, 23 (e.g., 23))) contiguous nucleotides differing by no more than 3 (e.g., 0, 1, 2, or 3) nucleotides from the nucleotide sequence of any one of the sense strands set forth in Table 2 or Table 3. In some embodiments, the sense strand comprises at least 21 (e.g., 22, 23, 24, 25, 26, 27, 28, 29, 30 (e.g., 21, 22, 23 (e.g., 23))) contiguous nucleotides differing by no more than 3 (e.g., 0, 1, 2, or 3) nucleotides from the nucleotide sequence of any one of the sense strands set forth in Table 2 or Table 3. In some embodiments, the sense strand comprises at least 23 (e.g., 24, 25, 26, 27, 28, 29, 30) contiguous nucleotides differing by no more than 3 (e.g., 0, 1, 2, or 3) nucleotides from the nucleotide sequence of any one of the sense strands set forth in Table 2 or Table 3.

[0325] In some embodiments, the sense strand comprises from about 15-23 (e.g., 15-22, 15-21, 15-20, 15-19, 15-18, 15-17, 15-16, 16-22, 16-20, 16-19, 16-18, 16-17, 17-23, 17-22, 17-21, 17-20, 17-19, 17-18, 18-23, 18-22, 18-21, 18-20, 18-19, 19-23, 19-22, 19-21, 19-20, 20-23, 20-22, 20-21, 21-23, 21-22, 22-23) contiguous nucleotides differing by no more than 3 (e.g., 0, 1, 2, or 3) nucleotides from the nucleotide sequence of any one of the sense strands set forth in Table 2 or Table 3. In some embodiments, the sense strand comprises from about 19-23 (e.g., 19-22, 19-21, 19-20, 20-23, 20-22, 20-21, 21-23, 21-22, 22-23) contiguous nucleotides differing by no more than 3 (e.g., 0, 1, 2, or 3) nucleotides from the nucleotide sequence of any one of the sense strands set forth in Table 2 or Table 3. In some embodiments, the sense strand comprises from about 21-23 (e.g., 21-22, 22-23) contiguous nucleotides differing by no more than 3 (e.g., 0, 1, 2, or 3) nucleotides from the nucleotide sequence of any one of the sense strands set forth in Table 2 or Table 3.

[0326] In some embodiments, the nucleotide sequence of the sense strand comprises the nucleotide sequence of any one of the sense strands set forth in Table 2 or Table 3 differing by no more than 3 (e.g., 0, 1, 2, or 3) nucleotides from the sense strand set forth in Table 2 or Table 3. In some embodiments, the nucleotide sequence of the sense strand comprises the nucleotide sequence of any one of the sense strands set forth in Table 2 or Table 3.

[0327] Table 2 or Table 3 further identifies the target nucleic acid molecule within the reference CIDEB mRNA transcript at least partially identical to each of the sense strands. As such, the disclosure further provides sense strands comprising at least 15 (e.g., 15, 16, 17, 18, 19, 20, 21, 22, 23, 24, 25, 26, 27, 28, 29, 30 (e.g., 19, 20, 21, 22, 23 (e.g., 23))) contiguous nucleotides differing by no more than 3 (e.g., 0, 1, 2, or 3) nucleotides from the nucleotide sequence of any one of the sense strands set forth in Table 2 or Table 3 and further comprising additional nucleotide sequences (e.g., comprising from about 1-10, 1-9, 1-8, 1-7, 1-6, 1-5, 1-4, 1-3, or 1-2 nucleotides) at least partially identical to the region contiguous (e.g., either at the 3′ end, the 5′ end, or both the 3′ and 5′ end) of the CIDEB mRNA transcript identical to the select sense strand.

[0328] In some embodiments, the nucleotide sequence of the sense strand differs by no more than 5 (e.g., 0, 1, 2, 3, 4, or 5) nucleotides from the nucleotide sequence set forth in any one of SEQ ID NOS: 4-186, 553-601, 658-892, or 1192. In some embodiments, the nucleotide sequence of the sense strand differs by no more than 3 (e.g., 0, 1, 2, or 3) nucleotides from the nucleotide sequence set forth in any one of SEQ ID NOS: 4-186, 553-601, 658-892, or 1192. In some embodiments, the nucleotide sequence of the sense strand differs by no more than 2 (e.g., 0, 1, or 2) nucleotides from the nucleotide sequence set forth in any one of SEQ ID NOS: 4-186, 553-601, 658-892, or 1192. In some embodiments, the nucleotide sequence of the sense strand differs by no more than 1 (e.g., 0 or 1) nucleotide from the nucleotide sequence set forth in any one of SEQ ID NOS: 4-186, 553-601, 658-892, or 1192.

[0329] In some embodiments, the nucleotide sequence of the sense strand comprises the nucleotide sequence set forth in any one of SEQ ID NOS: 4-186, 553-601, 658-892, or 1192 differing by no more than 5 (e.g., 0, 1, 2, 3, 4, or 5) nucleotides from the nucleotide sequence set forth in any one of SEQ ID NOS: 4-186, 553-601, 658-892, or 1192. In some embodiments, the nucleotide sequence of the sense strand comprises the nucleotide sequence set forth in any one of SEQ ID NOS: 4-186, 553-601, 658-892, or 1192 differing by no more than 3 (e.g., 0, 1, 2, or 3) nucleotides from the nucleotide sequence set forth in any one of SEQ ID NOS: 4-186, 553-601, 658-892, or 1192. In some embodiments, the nucleotide sequence of the sense strand comprises the nucleotide sequence set forth in any one of SEQ ID NOS: 4-186, 553-601, 658-892, or 1192 differing by no more than 2 (e.g., 0, 1, or 2) nucleotides from the nucleotide sequence set forth in any one of SEQ ID NOS: 4-186, 553-601, 658-892, or 1192. In some embodiments, the nucleotide sequence of the sense strand comprises the nucleotide sequence set forth in any one of SEQ ID NOS: 4-186, 553-601, 658-892, or 1192 differing by no more than 1 (e.g., 0 or 1) nucleotide from the nucleotide sequence set forth in any one of SEQ ID NOS: 4-186, 553-601, 658-892, or 1192.

[0330] In some embodiments, the nucleotide sequence of the sense strand is at least 85%, 86%, 87%, 88%, 89%, 90%, 91%, 92%, 93%, 94%, 95%, 96%, 97%, 98%, 99% or 100% identical to the nucleotide sequence set forth in any one of SEQ ID NOS: 4-186, 553-601, 658-892, or 1192. In some embodiments, the nucleotide sequence of the sense strand is at least 90%, 91%, 92%, 93%, 94%, 95%, 96%, 97%, 98%, 99% or 100% identical to the nucleotide sequence set forth in any one of SEQ ID NOS: 4-186, 553-601, 658-892, or 1192. In some embodiments, the nucleotide sequence of the sense strand is at least 95%, 96%, 97%, 98%, 99% or 100% identical to the nucleotide sequence set forth in any one of SEQ ID NOS: 4-186, 553-601, 658-892, or 1192. In some embodiments, the nucleotide sequence of the sense strand is at least 96%, 97%, 98%, 99% or 100% identical to the nucleotide sequence set forth in any one of SEQ ID NOS: 4-186, 553-601, 658-892, or 1192. In some embodiments, the nucleotide sequence of the sense strand is at least 97%, identical to the nucleotide sequence set forth in any one of SEQ ID NOS: 4-186, 553-601, 658-892, or 1192. In some embodiments, the nucleotide sequence of the sense strand is at least 98% identical to the nucleotide sequence set forth in any one of SEQ ID NOS: 4-186, 553-601, 658-892, or 1192. In some embodiments, the nucleotide sequence of the sense strand is at least 99% identical to the nucleotide sequence set forth in any one of SEQ ID NOS: 4-186, 553-601, 658-892, or 1192. In some embodiments, the nucleotide sequence of the sense strand is 100% identical to the nucleotide sequence set forth in any one of SEQ ID NOS: 4-186, 553-601, 658-892, or 1192.

[0331] In some embodiments, the nucleotide sequence of the sense strand comprises the nucleotide sequence set forth in any one of SEQ ID NOS: 4-186, 553-601, 658-892, or 1192. In some embodiments, the nucleotide sequence of the sense strand consists of the nucleotide sequence set forth in any one of SEQ ID NOS: 4-186, 553-601, 658-892, or 1192.

[0332] Table 2 or Table 3 further identifies the target nucleic acid molecule within the cited reference CIDEB mRNA transcript (SEQ ID NO: 1) targeted by each of the sense strands. As such, the disclosure further provides sense strands wherein the nucleotide sequence of the sense strand differs by no more than 5 (e.g., 0, 1, 2, 3, 4, or 5 (e.g., no more than 3 (e.g., 0, 1, 2, or 3))) nucleotides from the nucleotide sequence set forth in any one of SEQ ID NOS: 4-186, 553-601, 658-892, or 1192 and further comprising additional nucleotide sequences (e.g., comprising from about 1-10, 1-9, 1-8, 1-7, 1-6, 1-5, 1-4, 1-3, or 1-2 nucleotides) at least partially complementary to the region contiguous (e.g., either at the 3′ end, the 5′ end, or both the 3′ and 5′ end) of the CIDEB mRNA transcript targeted by the select sense strand.

[0333] In some embodiments, the sense strand comprises at least 15 (e.g., 15, 16, 17, 18, 19, 20, 21, 22, 23, 24, 25, 26, 27, 28, 29, 30 (e.g., 19, 20, 21, 22, 23 (e.g., 23))) contiguous nucleotides differing by no more than 3 (e.g., 0, 1, 2, or 3) nucleotides from the nucleotide sequence set forth in any one of SEQ ID NOS: 4-186, 553-601, 658-892, or 1192. In some embodiments, the sense strand comprises at least 19 (e.g., 20, 21, 22, 23, 24, 25, 26, 27, 28, 29, 30 (e.g., 19, 20, 21, 22, 23 (e.g., 23))) contiguous nucleotides differing by no more than 3 (e.g., 0, 1, 2, or 3) nucleotides from the nucleotide sequence of any one of the sense strands set forth in SEQ ID NOS: 4-186, 553-601, 658-892, or 1192. In some embodiments, the sense strand comprises at least 21 (e.g., 22, 23, 24, 25, 26, 27, 28, 29, 30 (e.g., 21, 22, 23 (e.g., 23))) contiguous nucleotides differing by no more than 3 (e.g., 0, 1, 2, or 3) nucleotides from the nucleotide sequence set forth in any one of SEQ ID NOS: 4-186, 553-601, 658-892, or 1192. In some embodiments, the sense strand comprises at least 23 (e.g., 24, 25, 26, 27, 28, 29, 30) contiguous nucleotides differing by no more than 3 (e.g., 0, 1, 2, or 3) nucleotides from the nucleotide sequence set forth in any one of SEQ ID NOS: 4-186, 553-601, 658-892, or 1192.

[0334] In some embodiments, the sense strand comprises from about 15-23 (e.g., 15-22, 15-21, 15-20, 15-19, 15-18, 15-17, 15-16, 16-22, 16-20, 16-19, 16-18, 16-17, 17-23, 17-22, 17-21, 17-20, 17-19, 17-18, 18-23, 18-22, 18-21, 18-20, 18-19, 19-23, 19-22, 19-21, 19-20, 20-23, 20-22, 20-21, 21-23, 21-22, 22-23) contiguous nucleotides differing by no more than 3 (e.g., 0, 1, 2, or 3) nucleotides from the nucleotide sequence set forth in any one of SEQ ID NOS: 4-186, 553-601, 658-892, or 1192. In some embodiments, the sense strand comprises from about 19-23 (e.g., 19-22, 19-21, 19-20, 20-23, 20-22, 20-21, 21-23, 21-22, 22-23) contiguous nucleotides differing by no more than 3 (e.g., 0, 1, 2, or 3) nucleotides from the nucleotide sequence set forth in any one of SEQ ID NOS: 4-186, 553-601, 658-892, or 1192. In some embodiments, the sense strand comprises from about 21-23 (e.g., 21-22, 22-23) contiguous nucleotides differing by no more than 3 (e.g., 0, 1, 2, or 3) nucleotides from the nucleotide sequence set forth in any one of SEQ ID NOS: 4-186, 553-601, 658-892, or 1192.

[0335] In some embodiments, the nucleotide sequence of the sense strand comprises the nucleotide sequence set forth in any one of SEQ ID NOS: 4-186, 553-601, 658-892, or 1192 differing by no more than 3 (e.g., 0, 1, 2, or 3) nucleotides from the nucleotide sequence set forth in any one of SEQ ID NOS: 4-186, 553-601, 658-892, or 1192. In some embodiments, the nucleotide sequence of the sense strand comprises the nucleotide sequence set forth in any one of SEQ ID NOS: 4-186, 553-601, 658-892, or 1192.

[0336] As described above, Table 2 or Table 3 further identifies the target nucleic acid molecule within the reference CIDEB mRNA transcript at least partially identical to each of the sense strands. As such, disclosure further provides sense strands comprising at least 15 (e.g., 15, 16, 17, 18, 19, 20, 21, 22, 23, 24, 25, 26, 27, 28, 29, 30 (e.g., 19, 20, 21, 22, 23 (e.g., 23))) contiguous nucleotides differing by no more than 3 (e.g., 0, 1, 2, or 3) nucleotides from the nucleotide sequence set forth in any one of SEQ ID NOS: 4-186, 553-601, 658-892, or 1192 and further comprising additional nucleotide sequences (e.g., comprising from about 1-10, 1-9, 1-8, 1-7, 1-6, 1-5, 1-4, 1-3, or 1-2 nucleotides) at least partially identical to the region contiguous (e.g., either at the 3′ end, the 5′ end, or both the 3′ and 5′ end) of the CIDEB mRNA transcript identical to the select sense strand.

[0337] In some embodiments, the nucleotide sequence of the sense strand differs by no more than 5 (e.g., 0, 1, 2, 3, 4, or 5) nucleotides from the nucleotide sequence set forth in any one of SEQ ID NOS: 132, 138, 172, or 173. In some embodiments, the nucleotide sequence of the sense strand differs by no more than 3 (e.g., 0, 1, 2, or 3) nucleotides from the nucleotide sequence set forth in any one of SEQ ID NOS: 132, 138, 172, or 173. In some embodiments, the nucleotide sequence of the sense strand differs by no more than 2 (e.g., 0, 1, or 2) nucleotides from the nucleotide sequence set forth in any one of SEQ ID NOS: 132, 138, 172, or 173. In some embodiments, the nucleotide sequence of the sense strand differs by no more than 1 (e.g., 0 or 1) nucleotide from the nucleotide sequence set forth in any one of SEQ ID NOS: 132, 138, 172, or 173.

[0338] In some embodiments, the nucleotide sequence of the sense strand comprises the nucleotide sequence set forth in any one of SEQ ID NOS: 132, 138, 172, or 173 differing by no more than 5 (e.g., 0, 1, 2, 3, 4, or 5) nucleotides from the nucleotide sequence set forth in any one of SEQ ID NOS: 315, 321, 355, 356. In some embodiments, the nucleotide sequence of the sense strand comprises the nucleotide sequence set forth in any one of SEQ ID NOS: 132, 138, 172, or 173 differing by no more than 3 (e.g., 0, 1, 2, or 3) nucleotides from the nucleotide sequence set forth in any one of SEQ ID NOS: 132, 138, 172, or 173. In some embodiments, the nucleotide sequence of the sense strand comprises the nucleotide sequence set forth in any one of SEQ ID NOS: 132, 138, 172, or 173 differing by no more than 2 (e.g., 0, 1, or 2) nucleotides from the nucleotide sequence set forth in any one of SEQ ID NOS: 132, 138, 172, or 173. In some embodiments, the nucleotide sequence of the sense strand comprises the nucleotide sequence set forth in any one of SEQ ID NOS: 132, 138, 172, or 173 differing by no more than 1 (e.g., 0 or 1) nucleotide from the nucleotide sequence set forth in any one of SEQ ID NOS: 132, 138, 172, or 173.

[0339] In some embodiments, the nucleotide sequence of the sense strand is at least 85%, 86%, 87%, 88%, 89%, 90%, 91%, 92%, 93%, 94%, 95%, 96%, 97%, 98%, 99% or 100% identical to the nucleotide sequence set forth in any one of SEQ ID NOS: 132, 138, 172, or 173. In some embodiments, the nucleotide sequence of the sense strand is at least 90%, 91%, 92%, 93%, 94%, 95%, 96%, 97%, 98%, 99% or 100% identical to the nucleotide sequence set forth in any one of SEQ ID NOS: 132, 138, 172, or 173. In some embodiments, the nucleotide sequence of the sense strand is at least 95%, 96%, 97%, 98%, 99% or 100% identical to the nucleotide sequence set forth in any one of SEQ ID NOS: 132, 138, 172, or 173. In some embodiments, the nucleotide sequence of the sense strand is at least 96%, 97%, 98%, 99% or 100% identical to the nucleotide sequence set forth in any one of SEQ ID NOS: 132, 138, 172, or 173. In some embodiments, the nucleotide sequence of the sense strand is at least 97%, identical to the nucleotide sequence set forth in any one of SEQ ID NOS: 132, 138, 172, or 173. In some embodiments, the nucleotide sequence of the sense strand is at least 98% identical to the nucleotide sequence set forth in any one of SEQ ID NOS: 132, 138, 172, or 173. In some embodiments, the nucleotide sequence of the sense strand is at least 99% identical to the nucleotide sequence set forth in any one of SEQ ID NOS: 132, 138, 172, or 173. In some embodiments, the nucleotide sequence of the sense strand is 100% identical to the nucleotide sequence set forth in any one of SEQ ID NOS: 132, 138, 172, or 173.

[0340] In some embodiments, the nucleotide sequence of the sense strand comprises the nucleotide sequence set forth in any one of SEQ ID NOS: 132, 138, 172, or 173. In some embodiments, the nucleotide sequence of the sense strand consists of the nucleotide sequence set forth in any one of SEQ ID NOS: 132, 138, 172, or 173.

[0341] Table 2 or Table 3 further identifies the target nucleic acid molecule within the cited reference CIDEB mRNA transcript (SEQ ID NO: 1) targeted by each of the sense strands. As such, the disclosure further provides sense strands wherein the nucleotide sequence of the sense strand differs by no more than 5 (e.g., 0, 1, 2, 3, 4, or 5 (e.g., no more than 3 (e.g., 0, 1, 2, or 3))) nucleotides from the nucleotide sequence set forth in any one of SEQ ID NOS: 132, 138, 172, or 173 and further comprising additional nucleotide sequences (e.g., comprising from about 1-10, 1-9, 1-8, 1-7, 1-6, 1-5, 1-4, 1-3, or 1-2 nucleotides) at least partially complementary to the region contiguous (e.g., either at the 3′ end, the 5′ end, or both the 3′ and 5′ end) of the CIDEB mRNA transcript targeted by the select sense strand.

[0342] In some embodiments, the nucleotide sequence of the sense strand differs by no more than 5 (e.g., 0, 1, 2, 3, 4, or 5) nucleotides from the nucleotide sequence set forth in any one of SEQ ID NOS: 786, 792, 827, or 1192. In some embodiments, the nucleotide sequence of the sense strand differs by no more than 3 (e.g., 0, 1, 2, or 3) nucleotides from the nucleotide sequence set forth in any one of SEQ ID NOS: 786, 792, 827, or 1192. In some embodiments, the nucleotide sequence of the sense strand differs by no more than 2 (e.g., 0, 1, or 2) nucleotides from the nucleotide sequence set forth in any one of SEQ ID NOS: 786, 792, 827, or 1192. In some embodiments, the nucleotide sequence of the sense strand differs by no more than 1 (e.g., 0 or 1) nucleotide from the nucleotide sequence set forth in any one of SEQ ID NOS: 786, 792, 827, or 1192.

[0343] In some embodiments, the nucleotide sequence of the sense strand comprises the nucleotide sequence set forth in any one of SEQ ID NOS: 786, 792, 827, or 1192 differing by no more than 5 (e.g., 0, 1, 2, 3, 4, or 5) nucleotides from the nucleotide sequence set forth in any one of SEQ ID NOS: 315, 321, 355, 356. In some embodiments, the nucleotide sequence of the sense strand comprises the nucleotide sequence set forth in any one of SEQ ID NOS: 786, 792, 827, or 1192 differing by no more than 3 (e.g., 0, 1, 2, or 3) nucleotides from the nucleotide sequence set forth in any one of SEQ ID NOS: 786, 792, 827, or 1192. In some embodiments, the nucleotide sequence of the sense strand comprises the nucleotide sequence set forth in any one of SEQ ID NOS: 786, 792, 827, or 1192 differing by no more than 2 (e.g., 0, 1, or 2) nucleotides from the nucleotide sequence set forth in any one of SEQ ID NOS: 786, 792, 827, or 1192. In some embodiments, the nucleotide sequence of the sense strand comprises the nucleotide sequence set forth in any one of SEQ ID NOS: 786, 792, 827, or 1192 differing by no more than 1 (e.g., 0 or 1) nucleotide from the nucleotide sequence set forth in any one of SEQ ID NOS: 786, 792, 827, or 1192.

[0344] In some embodiments, the nucleotide sequence of the sense strand is at least 85%, 86%, 87%, 88%, 89%, 90%, 91%, 92%, 93%, 94%, 95%, 96%, 97%, 98%, 99% or 100% identical to the nucleotide sequence set forth in any one of SEQ ID NOS: 786, 792, 827, or 1192. In some embodiments, the nucleotide sequence of the sense strand is at least 90%, 91%, 92%, 93%, 94%, 95%, 96%, 97%, 98%, 99% or 100% identical to the nucleotide sequence set forth in any one of SEQ ID NOS: 786, 792, 827, or 1192. In some embodiments, the nucleotide sequence of the sense strand is at least 95%, 96%, 97%, 98%, 99% or 100% identical to the nucleotide sequence set forth in any one of SEQ ID NOS: 786, 792, 827, or 1192. In some embodiments, the nucleotide sequence of the sense strand is at least 96%, 97%, 98%, 99% or 100% identical to the nucleotide sequence set forth in any one of SEQ ID NOS: 786, 792, 827, or 1192. In some embodiments, the nucleotide sequence of the sense strand is at least 97%, identical to the nucleotide sequence set forth in any one of SEQ ID NOS: 786, 792, 827, or 1192. In some embodiments, the nucleotide sequence of the sense strand is at least 98% identical to the nucleotide sequence set forth in any one of SEQ ID NOS: 786, 792, 827, or 1192. In some embodiments, the nucleotide sequence of the sense strand is at least 99% identical to the nucleotide sequence set forth in any one of SEQ ID NOS: 786, 792, 827, or 1192. In some embodiments, the nucleotide sequence of the sense strand is 100% identical to the nucleotide sequence set forth in any one of SEQ ID NOS: 786, 792, 827, or 1192.

[0345] In some embodiments, the nucleotide sequence of the sense strand comprises the nucleotide sequence set forth in any one of SEQ ID NOS: 786, 792, 827, or 1192. In some embodiments, the nucleotide sequence of the sense strand consists of the nucleotide sequence set forth in any one of SEQ ID NOS: 786, 792, 827, or 1192.

[0346] Table 2 or Table 3 further identifies the target nucleic acid molecule within the cited reference CIDEB mRNA transcript (SEQ ID NO: 1) targeted by each of the sense strands. As such, the disclosure further provides sense strands wherein the nucleotide sequence of the sense strand differs by no more than 5 (e.g., 0, 1, 2, 3, 4, or 5 (e.g., no more than 3 (e.g., 0, 1, 2, or 3))) nucleotides from the nucleotide sequence set forth in any one of SEQ ID NOS: 786, 792, 827, or 1192 and further comprising additional nucleotide sequences (e.g., comprising from about 1-10, 1-9, 1-8, 1-7, 1-6, 1-5, 1-4, 1-3, or 1-2 nucleotides) at least partially complementary to the region contiguous (e.g., either at the 3′ end, the 5′ end, or both the 3′ and 5′ end) of the CIDEB mRNA transcript targeted by the select sense strand.

[0347] In some embodiments, the nucleotide sequence of the sense strand differs by no more than 5 (e.g., 0, 1, 2, 3, 4, or 5) nucleotides from the nucleotide sequence set forth in SEQ ID NO: 132. In some embodiments, the nucleotide sequence of the sense strand differs by no more than 3 (e.g., 0, 1, 2, or 3) nucleotides from the nucleotide sequence set forth in SEQ ID NO: 132. In some embodiments, the nucleotide sequence of the sense strand differs by no more than 2 (e.g., 0, 1, or 2) nucleotides from the nucleotide sequence set forth in SEQ ID NO: 132. In some embodiments, the nucleotide sequence of the sense strand differs by no more than 1 (e.g., 0 or 1) nucleotide from the nucleotide sequence set forth in SEQ ID NO: 132.

[0348] In some embodiments, the nucleotide sequence of the sense strand comprises the nucleotide sequence set forth in SEQ ID NO: 132 differing by no more than 5 (e.g., 0, 1, 2, 3, 4, or 5) nucleotides from the nucleotide sequence set forth in SEQ ID NO: 132. In some embodiments, the nucleotide sequence of the sense strand comprises the nucleotide sequence set forth in SEQ ID NO: 132 differing by no more than 3 (e.g., 0, 1, 2, or 3) nucleotides from the nucleotide sequence set forth in SEQ ID NO: 132. In some embodiments, the nucleotide sequence of the sense strand comprises the nucleotide sequence set forth in SEQ ID NO: 132 differing by no more than 2 (e.g., 0, 1, or 2) nucleotides from the nucleotide sequence set forth in SEQ ID NO: 132. In some embodiments, the nucleotide sequence of the sense strand comprises the nucleotide sequence set forth in SEQ ID NO: 132 differing by no more than 1 (e.g., 0 or 1) nucleotide from nucleotide sequence set forth in SEQ ID NO: 132.

[0349] In some embodiments, the nucleotide sequence of the sense strand is at least 85%, 86%, 87%, 88%, 89%, 90%, 91%, 92%, 93%, 94%, 95%, 96%, 97%, 98%, 99% or 100% identical to the nucleotide sequence set forth in SEQ ID NO: 132. In some embodiments, the nucleotide sequence of the sense strand is at least 90%, 91%, 92%, 93%, 94%, 95%, 96%, 97%, 98%, 99% or 100% identical to the nucleotide sequence set forth in SEQ ID NO: 132. In some embodiments, the nucleotide sequence of the sense strand is at least 95%, 96%, 97%, 98%, 99% or 100% identical to the nucleotide sequence set forth in SEQ ID NO: 132. In some embodiments, the nucleotide sequence of the sense strand is at least 96%, 97%, 98%, 99% or 100% identical to the nucleotide sequence set forth in SEQ ID NO: 132. In some embodiments, the nucleotide sequence of the sense strand is at least 97%, identical to the nucleotide sequence set forth in SEQ ID NO: 132. In some embodiments, the nucleotide sequence of the sense strand is at least 98% identical to the nucleotide sequence set forth in SEQ ID NO: 132. In some embodiments, the nucleotide sequence of the sense strand is at least 99% identical to the nucleotide sequence set forth in SEQ ID NO: 132. In some embodiments, the nucleotide sequence of the sense strand is 100% identical to the nucleotide sequence set forth in SEQ ID NO: 132.

[0350] In some embodiments, the nucleotide sequence of the sense strand comprises the nucleotide sequence set forth in SEQ ID NO: 132. In some embodiments, the nucleotide sequence of the sense strand consists of the nucleotide sequence set forth in SEQ ID NO: 132.

[0351] Table 2 or Table 3 further identifies the target nucleic acid molecule within the cited reference CIDEB mRNA transcript (SEQ ID NO: 1) targeted by each of the sense strands. As such, the disclosure further provides an sense strand wherein the nucleotide sequence of the sense strand differs by no more than 5 (e.g., 0, 1, 2, 3, 4, or 5 (e.g., no more than 3 (e.g., 0, 1, 2, or 3))) nucleotides from the nucleotide sequence set forth in SEQ ID NO: 132 and further comprising additional nucleotide sequences (e.g., comprising from about 1-10, 1-9, 1-8, 1-7, 1-6, 1-5, 1-4, 1-3, or 1-2 nucleotides) at least partially complementary to the region contiguous (e.g., either at the 3′ end, the 5′ end, or both the 3′ and 5′ end) of the CIDEB mRNA transcript targeted by the select sense strand.

[0352] In some embodiments, the sense strand comprises at least 15 (e.g., 15, 16, 17, 18, 19, 20, 21, 22, 23, 24, 25, 26, 27, 28, 29, 30 (e.g., 19, 20, 21, 22, 23 (e.g., 23))) contiguous nucleotides differing by no more than 3 (e.g., 0, 1, 2, or 3) nucleotides from the nucleotide sequence set forth in SEQ ID NO: 132. In some embodiments, the sense strand comprises at least 19 (e.g., 20, 21, 22, 23, 24, 25, 26, 27, 28, 29, 30 (e.g., 19, 20, 21, 22, 23 (e.g., 23))) contiguous nucleotides differing by no more than 3 (e.g., 0, 1, 2, or 3) nucleotides from the nucleotide sequence of any one of the sense strands set forth in SEQ ID NO: 132. In some embodiments, the sense strand comprises at least 21 (e.g., 22, 23, 24, 25, 26, 27, 28, 29, 30 (e.g., 21, 22, 23 (e.g., 23))) contiguous nucleotides differing by no more than 3 (e.g., 0, 1, 2, or 3) nucleotides from the nucleotide sequence set forth in SEQ ID NO: 132. In some embodiments, the sense strand comprises at least 23 (e.g., 24, 25, 26, 27, 28, 29, 30) contiguous nucleotides differing by no more than 3 (e.g., 0, 1, 2, or 3) nucleotides from the nucleotide sequence set forth in SEQ ID NO: 132.

[0353] In some embodiments, the sense strand comprises from about 15-23 (e.g., 15-22, 15-21, 15-20, 15-19, 15-18, 15-17, 15-16, 16-22, 16-20, 16-19, 16-18, 16-17, 17-23, 17-22, 17-21, 17-20, 17-19, 17-18, 18-23, 18-22, 18-21, 18-20, 18-19, 19-23, 19-22, 19-21, 19-20, 20-23, 20-22, 20-21, 21-23, 21-22, 22-23) contiguous nucleotides differing by no more than 3 (e.g., 0, 1, 2, or 3) nucleotides from the nucleotide sequence set forth in SEQ ID NO: 132. In some embodiments, the sense strand comprises from about 19-23 (e.g., 19-22, 19-21, 19-20, 20-23, 20-22, 20-21, 21-23, 21-22, 22-23) contiguous nucleotides differing by no more than 3 (e.g., 0, 1, 2, or 3) nucleotides from the nucleotide sequence set forth in SEQ ID NO: 132. In some embodiments, the sense strand comprises from about 21-23 (e.g., 21-22, 22-23) contiguous nucleotides differing by no more than 3 (e.g., 0, 1, 2, or 3) nucleotides from the nucleotide sequence set forth in SEQ ID NO: 132.

[0354] In some embodiments, the nucleotide sequence of the sense strand comprises the nucleotide sequence set forth in SEQ ID NO: 132 differing by no more than 3 (e.g., 0, 1, 2, or 3) nucleotides from the nucleotide sequence set forth in SEQ ID NO: 132. In some embodiments, the nucleotide sequence of the sense strand comprises the nucleotide sequence set forth in SEQ ID NO: 132.

[0355] As described above, Table 2 or Table 3 further identifies the target nucleic acid molecule within the reference CIDEB mRNA transcript at least partially identical to each of the sense strands. As such, disclosure further provides sense strands comprising at least 15 (e.g., 15, 16, 17, 18, 19, 20, 21, 22, 23, 24, 25, 26, 27, 28, 29, 30 (e.g., 19, 20, 21, 22, 23 (e.g., 23))) contiguous nucleotides differing by no more than 3 (e.g., 0, 1, 2, or 3) nucleotides from the nucleotide sequence set forth in SEQ ID NO: 132 and further comprising additional nucleotide sequences (e.g., comprising from about 1-10, 1-9, 1-8, 1-7, 1-6, 1-5, 1-4, 1-3, or 1-2 nucleotides) at least partially identical to the region contiguous (e.g., either at the 3′ end, the 5′ end, or both the 3′ and 5′ end) of the CIDEB mRNA transcript identical to the select sense strand.

[0356] In some embodiments, the nucleotide sequence of the sense strand differs by no more than 5 (e.g., 0, 1, 2, 3, 4, or 5) nucleotides from the nucleotide sequence set forth in SEQ ID NO: 138. In some embodiments, the nucleotide sequence of the sense strand differs by no more than 3 (e.g., 0, 1, 2, or 3) nucleotides from the nucleotide sequence set forth in SEQ ID NO: 138. In some embodiments, the nucleotide sequence of the sense strand differs by no more than 2 (e.g., 0, 1, or 2) nucleotides from the nucleotide sequence set forth in SEQ ID NO: 138. In some embodiments, the nucleotide sequence of the sense strand differs by no more than 1 (e.g., 0 or 1) nucleotide from the nucleotide sequence set forth in SEQ ID NO: 138.

[0357] In some embodiments, the nucleotide sequence of the sense strand comprises the nucleotide sequence set forth in SEQ ID NO: 138 differing by no more than 5 (e.g., 0, 1, 2, 3, 4, or 5) nucleotides from the nucleotide sequence set forth in SEQ ID NO: 138. In some embodiments, the nucleotide sequence of the sense strand comprises the nucleotide sequence set forth in SEQ ID NO: 138 differing by no more than 3 (e.g., 0, 1, 2, or 3) nucleotides from the nucleotide sequence set forth in SEQ ID NO: 138. In some embodiments, the nucleotide sequence of the sense strand comprises the nucleotide sequence set forth in SEQ ID NO: 138 differing by no more than 2 (e.g., 0, 1, or 2) nucleotides from the nucleotide sequence set forth in SEQ ID NO: 138. In some embodiments, the nucleotide sequence of the sense strand comprises the nucleotide sequence set forth in SEQ ID NO: 138 differing by no more than 1 (e.g., 0 or 1) nucleotide from nucleotide sequence set forth in SEQ ID NO: 138.

[0358] In some embodiments, the nucleotide sequence of the sense strand is at least 85%, 86%, 87%, 88%, 89%, 90%, 91%, 92%, 93%, 94%, 95%, 96%, 97%, 98%, 99% or 100% identical to the nucleotide sequence set forth in SEQ ID NO: 138. In some embodiments, the nucleotide sequence of the sense strand is at least 90%, 91%, 92%, 93%, 94%, 95%, 96%, 97%, 98%, 99% or 100% identical to the nucleotide sequence set forth in SEQ ID NO: 138. In some embodiments, the nucleotide sequence of the sense strand is at least 95%, 96%, 97%, 98%, 99% or 100% identical to the nucleotide sequence set forth in SEQ ID NO: 138. In some embodiments, the nucleotide sequence of the sense strand is at least 96%, 97%, 98%, 99% or 100% identical to the nucleotide sequence set forth in SEQ ID NO: 138. In some embodiments, the nucleotide sequence of the sense strand is at least 97%, identical to the nucleotide sequence set forth in SEQ ID NO: 138. In some embodiments, the nucleotide sequence of the sense strand is at least 98% identical to the nucleotide sequence set forth in SEQ ID NO: 138. In some embodiments, the nucleotide sequence of the sense strand is at least 99% identical to the nucleotide sequence set forth in SEQ ID NO: 138. In some embodiments, the nucleotide sequence of the sense strand is 100% identical to the nucleotide sequence set forth in SEQ ID NO: 138.

[0359] In some embodiments, the nucleotide sequence of the sense strand comprises the nucleotide sequence set forth in SEQ ID NO: 138. In some embodiments, the nucleotide sequence of the sense strand consists of the nucleotide sequence set forth in SEQ ID NO: 138.

[0360] Table 2 or Table 3 further identifies the target nucleic acid molecule within the cited reference CIDEB mRNA transcript (SEQ ID NO: 1) targeted by each of the sense strands. As such, the disclosure further provides an sense strand wherein the nucleotide sequence of the sense strand differs by no more than 5 (e.g., 0, 1, 2, 3, 4, or 5 (e.g., no more than 3 (e.g., 0, 1, 2, or 3))) nucleotides from the nucleotide sequence set forth in SEQ ID NO: 138 and further comprising additional nucleotide sequences (e.g., comprising from about 1-10, 1-9, 1-8, 1-7, 1-6, 1-5, 1-4, 1-3, or 1-2 nucleotides) at least partially complementary to the region contiguous (e.g., either at the 3′ end, the 5′ end, or both the 3′ and 5′ end) of the CIDEB mRNA transcript targeted by the select sense strand.

[0361] In some embodiments, the sense strand comprises at least 15 (e.g., 15, 16, 17, 18, 19, 20, 21, 22, 23, 24, 25, 26, 27, 28, 29, 30 (e.g., 19, 20, 21, 22, 23 (e.g., 23))) contiguous nucleotides differing by no more than 3 (e.g., 0, 1, 2, or 3) nucleotides from the nucleotide sequence set forth in SEQ ID NO: 138. In some embodiments, the sense strand comprises at least 19 (e.g., 20, 21, 22, 23, 24, 25, 26, 27, 28, 29, 30 (e.g., 19, 20, 21, 22, 23 (e.g., 23))) contiguous nucleotides differing by no more than 3 (e.g., 0, 1, 2, or 3) nucleotides from the nucleotide sequence of any one of the sense strands set forth in SEQ ID NO: 138. In some embodiments, the sense strand comprises at least 21 (e.g., 22, 23, 24, 25, 26, 27, 28, 29, 30 (e.g., 21, 22, 23 (e.g., 23))) contiguous nucleotides differing by no more than 3 (e.g., 0, 1, 2, or 3) nucleotides from the nucleotide sequence set forth in SEQ ID NO: 138. In some embodiments, the sense strand comprises at least 23 (e.g., 24, 25, 26, 27, 28, 29, 30) contiguous nucleotides differing by no more than 3 (e.g., 0, 1, 2, or 3) nucleotides from the nucleotide sequence set forth in SEQ ID NO: 138.

[0362] In some embodiments, the sense strand comprises from about 15-23 (e.g., 15-22, 15-21, 15-20, 15-19, 15-18, 15-17, 15-16, 16-22, 16-20, 16-19, 16-18, 16-17, 17-23, 17-22, 17-21, 17-20, 17-19, 17-18, 18-23, 18-22, 18-21, 18-20, 18-19, 19-23, 19-22, 19-21, 19-20, 20-23, 20-22, 20-21, 21-23, 21-22, 22-23) contiguous nucleotides differing by no more than 3 (e.g., 0, 1, 2, or 3) nucleotides from the nucleotide sequence set forth in SEQ ID NO: 138. In some embodiments, the sense strand comprises from about 19-23 (e.g., 19-22, 19-21, 19-20, 20-23, 20-22, 20-21, 21-23, 21-22, 22-23) contiguous nucleotides differing by no more than 3 (e.g., 0, 1, 2, or 3) nucleotides from the nucleotide sequence set forth in SEQ ID NO: 138. In some embodiments, the sense strand comprises from about 21-23 (e.g., 21-22, 22-23) contiguous nucleotides differing by no more than 3 (e.g., 0, 1, 2, or 3) nucleotides from the nucleotide sequence set forth in SEQ ID NO: 138.

[0363] In some embodiments, the nucleotide sequence of the sense strand comprises the nucleotide sequence set forth in SEQ ID NO: 138 differing by no more than 3 (e.g., 0, 1, 2, or 3) nucleotides from the nucleotide sequence set forth in SEQ ID NO: 138. In some embodiments, the nucleotide sequence of the sense strand comprises the nucleotide sequence set forth in SEQ ID NO: 138.

[0364] As described above, Table 2 or Table 3 further identifies the target nucleic acid molecule within the reference CIDEB mRNA transcript at least partially identical to each of the sense strands. As such, disclosure further provides sense strands comprising at least 15 (e.g., 15, 16, 17, 18, 19, 20, 21, 22, 23, 24, 25, 26, 27, 28, 29, 30 (e.g., 19, 20, 21, 22, 23 (e.g., 23))) contiguous nucleotides differing by no more than 3 (e.g., 0, 1, 2, or 3) nucleotides from the nucleotide sequence set forth in SEQ ID NO: 138 and further comprising additional nucleotide sequences (e.g., comprising from about 1-10, 1-9, 1-8, 1-7, 1-6, 1-5, 1-4, 1-3, or 1-2 nucleotides) at least partially identical to the region contiguous (e.g., either at the 3′ end, the 5′ end, or both the 3′ and 5′ end) of the CIDEB mRNA transcript identical to the select sense strand.

[0365] In some embodiments, the nucleotide sequence of the sense strand differs by no more than 5 (e.g., 0, 1, 2, 3, 4, or 5) nucleotides from the nucleotide sequence set forth in SEQ ID NO: 172. In some embodiments, the nucleotide sequence of the sense strand differs by no more than 3 (e.g., 0, 1, 2, or 3) nucleotides from the nucleotide sequence set forth in SEQ ID NO: 172. In some embodiments, the nucleotide sequence of the sense strand differs by no more than 2 (e.g., 0, 1, or 2) nucleotides from the nucleotide sequence set forth in SEQ ID NO: 172. In some embodiments, the nucleotide sequence of the sense strand differs by no more than 1 (e.g., 0 or 1) nucleotide from the nucleotide sequence set forth in SEQ ID NO: 172.

[0366] In some embodiments, the nucleotide sequence of the sense strand comprises the nucleotide sequence set forth in SEQ ID NO: 172 differing by no more than 5 (e.g., 0, 1, 2, 3, 4, or 5) nucleotides from the nucleotide sequence set forth in SEQ ID NO: 172. In some embodiments, the nucleotide sequence of the sense strand comprises the nucleotide sequence set forth in SEQ ID NO: 172 differing by no more than 3 (e.g., 0, 1, 2, or 3) nucleotides from the nucleotide sequence set forth in SEQ ID NO: 172. In some embodiments, the nucleotide sequence of the sense strand comprises the nucleotide sequence set forth in SEQ ID NO: 172 differing by no more than 2 (e.g., 0, 1, or 2) nucleotides from the nucleotide sequence set forth in SEQ ID NO: 172. In some embodiments, the nucleotide sequence of the sense strand comprises the nucleotide sequence set forth in SEQ ID NO: 172 differing by no more than 1 (e.g., 0 or 1) nucleotide from nucleotide sequence set forth in SEQ ID NO: 172.

[0367] In some embodiments, the nucleotide sequence of the sense strand is at least 85%, 86%, 87%, 88%, 89%, 90%, 91%, 92%, 93%, 94%, 95%, 96%, 97%, 98%, 99% or 100% identical to the nucleotide sequence set forth in SEQ ID NO: 172. In some embodiments, the nucleotide sequence of the sense strand is at least 90%, 91%, 92%, 93%, 94%, 95%, 96%, 97%, 98%, 99% or 100% identical to the nucleotide sequence set forth in SEQ ID NO: 172. In some embodiments, the nucleotide sequence of the sense strand is at least 95%, 96%, 97%, 98%, 99% or 100% identical to the nucleotide sequence set forth in SEQ ID NO: 172. In some embodiments, the nucleotide sequence of the sense strand is at least 96%, 97%, 98%, 99% or 100% identical to the nucleotide sequence set forth in SEQ ID NO: 172. In some embodiments, the nucleotide sequence of the sense strand is at least 97%, identical to the nucleotide sequence set forth in SEQ ID NO: 172. In some embodiments, the nucleotide sequence of the sense strand is at least 98% identical to the nucleotide sequence set forth in SEQ ID NO: 172. In some embodiments, the nucleotide sequence of the sense strand is at least 99% identical to the nucleotide sequence set forth in SEQ ID NO: 172. In some embodiments, the nucleotide sequence of the sense strand is 100% identical to the nucleotide sequence set forth in SEQ ID NO: 172.

[0368] In some embodiments, the nucleotide sequence of the sense strand comprises the nucleotide sequence set forth in SEQ ID NO: 172. In some embodiments, the nucleotide sequence of the sense strand consists of the nucleotide sequence set forth in SEQ ID NO: 172.

[0369] Table 2 or Table 3 further identifies the target nucleic acid molecule within the cited reference CIDEB mRNA transcript (SEQ ID NO: 1) targeted by each of the sense strands. As such, the disclosure further provides an sense strand wherein the nucleotide sequence of the sense strand differs by no more than 5 (e.g., 0, 1, 2, 3, 4, or 5 (e.g., no more than 3 (e.g., 0, 1, 2, or 3))) nucleotides from the nucleotide sequence set forth in SEQ ID NO: 172 and further comprising additional nucleotide sequences (e.g., comprising from about 1-10, 1-9, 1-8, 1-7, 1-6, 1-5, 1-4, 1-3, or 1-2 nucleotides) at least partially complementary to the region contiguous (e.g., either at the 3′ end, the 5′ end, or both the 3′ and 5′ end) of the CIDEB mRNA transcript targeted by the select sense strand.

[0370] In some embodiments, the sense strand comprises at least 15 (e.g., 15, 16, 17, 18, 19, 20, 21, 22, 23, 24, 25, 26, 27, 28, 29, 30 (e.g., 19, 20, 21, 22, 23 (e.g., 23))) contiguous nucleotides differing by no more than 3 (e.g., 0, 1, 2, or 3) nucleotides from the nucleotide sequence set forth in SEQ ID NO: 172. In some embodiments, the sense strand comprises at least 19 (e.g., 20, 21, 22, 23, 24, 25, 26, 27, 28, 29, 30 (e.g., 19, 20, 21, 22, 23 (e.g., 23))) contiguous nucleotides differing by no more than 3 (e.g., 0, 1, 2, or 3) nucleotides from the nucleotide sequence of any one of the sense strands set forth in SEQ ID NO: 172. In some embodiments, the sense strand comprises at least 21 (e.g., 22, 23, 24, 25, 26, 27, 28, 29, 30 (e.g., 21, 22, 23 (e.g., 23))) contiguous nucleotides differing by no more than 3 (e.g., 0, 1, 2, or 3) nucleotides from the nucleotide sequence set forth in SEQ ID NO: 172. In some embodiments, the sense strand comprises at least 23 (e.g., 24, 25, 26, 27, 28, 29, 30) contiguous nucleotides differing by no more than 3 (e.g., 0, 1, 2, or 3) nucleotides from the nucleotide sequence set forth in SEQ ID NO: 172.

[0371] In some embodiments, the sense strand comprises from about 15-23 (e.g., 15-22, 15-21, 15-20, 15-19, 15-18, 15-17, 15-16, 16-22, 16-20, 16-19, 16-18, 16-17, 17-23, 17-22, 17-21, 17-20, 17-19, 17-18, 18-23, 18-22, 18-21, 18-20, 18-19, 19-23, 19-22, 19-21, 19-20, 20-23, 20-22, 20-21, 21-23, 21-22, 22-23) contiguous nucleotides differing by no more than 3 (e.g., 0, 1, 2, or 3) nucleotides from the nucleotide sequence set forth in SEQ ID NO: 172. In some embodiments, the sense strand comprises from about 19-23 (e.g., 19-22, 19-21, 19-20, 20-23, 20-22, 20-21, 21-23, 21-22, 22-23) contiguous nucleotides differing by no more than 3 (e.g., 0, 1, 2, or 3) nucleotides from the nucleotide sequence set forth in SEQ ID NO: 172. In some embodiments, the sense strand comprises from about 21-23 (e.g., 21-22, 22-23) contiguous nucleotides differing by no more than 3 (e.g., 0, 1, 2, or 3) nucleotides from the nucleotide sequence set forth in SEQ ID NO: 172.

[0372] In some embodiments, the nucleotide sequence of the sense strand comprises the nucleotide sequence set forth in SEQ ID NO: 172 differing by no more than 3 (e.g., 0, 1, 2, or 3) nucleotides from the nucleotide sequence set forth in SEQ ID NO: 172. In some embodiments, the nucleotide sequence of the sense strand comprises the nucleotide sequence set forth in SEQ ID NO: 172.

[0373] As described above, Table 2 or Table 3 further identifies the target nucleic acid molecule within the reference CIDEB mRNA transcript at least partially identical to each of the sense strands. As such, disclosure further provides sense strands comprising at least 15 (e.g., 15, 16, 17, 18, 19, 20, 21, 22, 23, 24, 25, 26, 27, 28, 29, 30 (e.g., 19, 20, 21, 22, 23 (e.g., 23))) contiguous nucleotides differing by no more than 3 (e.g., 0, 1, 2, or 3) nucleotides from the nucleotide sequence set forth in SEQ ID NO: 172 and further comprising additional nucleotide sequences (e.g., comprising from about 1-10, 1-9, 1-8, 1-7, 1-6, 1-5, 1-4, 1-3, or 1-2 nucleotides) at least partially identical to the region contiguous (e.g., either at the 3′ end, the 5′ end, or both the 3′ and 5′ end) of the CIDEB mRNA transcript identical to the select sense strand.

[0374] In some embodiments, the nucleotide sequence of the sense strand differs by no more than 5 (e.g., 0, 1, 2, 3, 4, or 5) nucleotides from the nucleotide sequence set forth in SEQ ID NO: 173. In some embodiments, the nucleotide sequence of the sense strand differs by no more than 3 (e.g., 0, 1, 2, or 3) nucleotides from the nucleotide sequence set forth in SEQ ID NO: 173. In some embodiments, the nucleotide sequence of the sense strand differs by no more than 2 (e.g., 0, 1, or 2) nucleotides from the nucleotide sequence set forth in SEQ ID NO: 173. In some embodiments, the nucleotide sequence of the sense strand differs by no more than 1 (e.g., 0 or 1) nucleotide from the nucleotide sequence set forth in SEQ ID NO: 173.

[0375] In some embodiments, the nucleotide sequence of the sense strand comprises the nucleotide sequence set forth in SEQ ID NO: 173 differing by no more than 5 (e.g., 0, 1, 2, 3, 4, or 5) nucleotides from the nucleotide sequence set forth in SEQ ID NO: 173. In some embodiments, the nucleotide sequence of the sense strand comprises the nucleotide sequence set forth in SEQ ID NO: 173 differing by no more than 3 (e.g., 0, 1, 2, or 3) nucleotides from the nucleotide sequence set forth in SEQ ID NO: 173. In some embodiments, the nucleotide sequence of the sense strand comprises the nucleotide sequence set forth in SEQ ID NO: 173 differing by no more than 2 (e.g., 0, 1, or 2) nucleotides from the nucleotide sequence set forth in SEQ ID NO: 173. In some embodiments, the nucleotide sequence of the sense strand comprises the nucleotide sequence set forth in SEQ ID NO: 173 differing by no more than 1 (e.g., 0 or 1) nucleotide from nucleotide sequence set forth in SEQ ID NO: 173.

[0376] In some embodiments, the nucleotide sequence of the sense strand is at least 85%, 86%, 87%, 88%, 89%, 90%, 91%, 92%, 93%, 94%, 95%, 96%, 97%, 98%, 99% or 100% identical to the nucleotide sequence set forth in SEQ ID NO: 173. In some embodiments, the nucleotide sequence of the sense strand is at least 90%, 91%, 92%, 93%, 94%, 95%, 96%, 97%, 98%, 99% or 100% identical to the nucleotide sequence set forth in SEQ ID NO: 173. In some embodiments, the nucleotide sequence of the sense strand is at least 95%, 96%, 97%, 98%, 99% or 100% identical to the nucleotide sequence set forth in SEQ ID NO: 173. In some embodiments, the nucleotide sequence of the sense strand is at least 96%, 97%, 98%, 99% or 100% identical to the nucleotide sequence set forth in SEQ ID NO: 173. In some embodiments, the nucleotide sequence of the sense strand is at least 97%, identical to the nucleotide sequence set forth in SEQ ID NO: 173. In some embodiments, the nucleotide sequence of the sense strand is at least 98% identical to the nucleotide sequence set forth in SEQ ID NO: 173. In some embodiments, the nucleotide sequence of the sense strand is at least 99% identical to the nucleotide sequence set forth in SEQ ID NO: 173. In some embodiments, the nucleotide sequence of the sense strand is 100% identical to the nucleotide sequence set forth in SEQ ID NO: 173.

[0377] In some embodiments, the nucleotide sequence of the sense strand comprises the nucleotide sequence set forth in SEQ ID NO: 173. In some embodiments, the nucleotide sequence of the sense strand consists of the nucleotide sequence set forth in SEQ ID NO: 173.

[0378] Table 2 or Table 3 further identifies the target nucleic acid molecule within the cited reference CIDEB mRNA transcript (SEQ ID NO: 1) targeted by each of the sense strands. As such, the disclosure further provides an sense strand wherein the nucleotide sequence of the sense strand differs by no more than 5 (e.g., 0, 1, 2, 3, 4, or 5 (e.g., no more than 3 (e.g., 0, 1, 2, or 3))) nucleotides from the nucleotide sequence set forth in SEQ ID NO: 173 and further comprising additional nucleotide sequences (e.g., comprising from about 1-10, 1-9, 1-8, 1-7, 1-6, 1-5, 1-4, 1-3, or 1-2 nucleotides) at least partially complementary to the region contiguous (e.g., either at the 3′ end, the 5′ end, or both the 3′ and 5′ end) of the CIDEB mRNA transcript targeted by the select sense strand.

[0379] In some embodiments, the sense strand comprises at least 15 (e.g., 15, 16, 17, 18, 19, 20, 21, 22, 23, 24, 25, 26, 27, 28, 29, 30 (e.g., 19, 20, 21, 22, 23 (e.g., 23))) contiguous nucleotides differing by no more than 3 (e.g., 0, 1, 2, or 3) nucleotides from the nucleotide sequence set forth in SEQ ID NO: 173. In some embodiments, the sense strand comprises at least 19 (e.g., 20, 21, 22, 23, 24, 25, 26, 27, 28, 29, 30 (e.g., 19, 20, 21, 22, 23 (e.g., 23))) contiguous nucleotides differing by no more than 3 (e.g., 0, 1, 2, or 3) nucleotides from the nucleotide sequence of any one of the sense strands set forth in SEQ ID NO: 173. In some embodiments, the sense strand comprises at least 21 (e.g., 22, 23, 24, 25, 26, 27, 28, 29, 30 (e.g., 21, 22, 23 (e.g., 23))) contiguous nucleotides differing by no more than 3 (e.g., 0, 1, 2, or 3) nucleotides from the nucleotide sequence set forth in SEQ ID NO: 173. In some embodiments, the sense strand comprises at least 23 (e.g., 24, 25, 26, 27, 28, 29, 30) contiguous nucleotides differing by no more than 3 (e.g., 0, 1, 2, or 3) nucleotides from the nucleotide sequence set forth in SEQ ID NO: 173.

[0380] In some embodiments, the sense strand comprises from about 15-23 (e.g., 15-22, 15-21, 15-20, 15-19, 15-18, 15-17, 15-16, 16-22, 16-20, 16-19, 16-18, 16-17, 17-23, 17-22, 17-21, 17-20, 17-19, 17-18, 18-23, 18-22, 18-21, 18-20, 18-19, 19-23, 19-22, 19-21, 19-20, 20-23, 20-22, 20-21, 21-23, 21-22, 22-23) contiguous nucleotides differing by no more than 3 (e.g., 0, 1, 2, or 3) nucleotides from the nucleotide sequence set forth in SEQ ID NO: 173. In some embodiments, the sense strand comprises from about 19-23 (e.g., 19-22, 19-21, 19-20, 20-23, 20-22, 20-21, 21-23, 21-22, 22-23) contiguous nucleotides differing by no more than 3 (e.g., 0, 1, 2, or 3) nucleotides from the nucleotide sequence set forth in SEQ ID NO: 173. In some embodiments, the sense strand comprises from about 21-23 (e.g., 21-22, 22-23) contiguous nucleotides differing by no more than 3 (e.g., 0, 1, 2, or 3) nucleotides from the nucleotide sequence set forth in SEQ ID NO: 173.

[0381] In some embodiments, the nucleotide sequence of the sense strand comprises the nucleotide sequence set forth in SEQ ID NO: 173 differing by no more than 3 (e.g., 0, 1, 2, or 3) nucleotides from the nucleotide sequence set forth in SEQ ID NO: 173. In some embodiments, the nucleotide sequence of the sense strand comprises the nucleotide sequence set forth in SEQ ID NO: 173.

[0382] As described above, Table 2 or Table 3 further identifies the target nucleic acid molecule within the reference CIDEB mRNA transcript at least partially identical to each of the sense strands. As such, disclosure further provides sense strands comprising at least 15 (e.g., 15, 16, 17, 18, 19, 20, 21, 22, 23, 24, 25, 26, 27, 28, 29, 30 (e.g., 19, 20, 21, 22, 23 (e.g., 23))) contiguous nucleotides differing by no more than 3 (e.g., 0, 1, 2, or 3) nucleotides from the nucleotide sequence set forth in SEQ ID NO: 173 and further comprising additional nucleotide sequences (e.g., comprising from about 1-10, 1-9, 1-8, 1-7, 1-6, 1-5, 1-4, 1-3, or 1-2 nucleotides) at least partially identical to the region contiguous (e.g., either at the 3′ end, the 5′ end, or both the 3′ and 5′ end) of the CIDEB mRNA transcript identical to the select sense strand.

[0383] In some embodiments, the nucleotide sequence of the sense strand differs by no more than 5 (e.g., 0, 1, 2, 3, 4, or 5) nucleotides from the nucleotide sequence set forth in SEQ ID NO: 786. In some embodiments, the nucleotide sequence of the sense strand differs by no more than 3 (e.g., 0, 1, 2, or 3) nucleotides from the nucleotide sequence set forth in SEQ ID NO: 786. In some embodiments, the nucleotide sequence of the sense strand differs by no more than 2 (e.g., 0, 1, or 2) nucleotides from the nucleotide sequence set forth in SEQ ID NO: 786. In some embodiments, the nucleotide sequence of the sense strand differs by no more than 1 (e.g., 0 or 1) nucleotide from the nucleotide sequence set forth in SEQ ID NO: 786.

[0384] In some embodiments, the nucleotide sequence of the sense strand comprises the nucleotide sequence set forth in SEQ ID NO: 786 differing by no more than 5 (e.g., 0, 1, 2, 3, 4, or 5) nucleotides from the nucleotide sequence set forth in SEQ ID NO: 786. In some embodiments, the nucleotide sequence of the sense strand comprises the nucleotide sequence set forth in SEQ ID NO: 786 differing by no more than 3 (e.g., 0, 1, 2, or 3) nucleotides from the nucleotide sequence set forth in SEQ ID NO: 786. In some embodiments, the nucleotide sequence of the sense strand comprises the nucleotide sequence set forth in SEQ ID NO: 786 differing by no more than 2 (e.g., 0, 1, or 2) nucleotides from the nucleotide sequence set forth in SEQ ID NO: 786. In some embodiments, the nucleotide sequence of the sense strand comprises the nucleotide sequence set forth in SEQ ID NO: 786 differing by no more than 1 (e.g., 0 or 1) nucleotide from nucleotide sequence set forth in SEQ ID NO: 786.

[0385] In some embodiments, the nucleotide sequence of the sense strand is at least 85%, 86%, 87%, 88%, 89%, 90%, 91%, 92%, 93%, 94%, 95%, 96%, 97%, 98%, 99% or 100% identical to the nucleotide sequence set forth in SEQ ID NO: 786. In some embodiments, the nucleotide sequence of the sense strand is at least 90%, 91%, 92%, 93%, 94%, 95%, 96%, 97%, 98%, 99% or 100% identical to the nucleotide sequence set forth in SEQ ID NO: 786. In some embodiments, the nucleotide sequence of the sense strand is at least 95%, 96%, 97%, 98%, 99% or 100% identical to the nucleotide sequence set forth in SEQ ID NO: 786. In some embodiments, the nucleotide sequence of the sense strand is at least 96%, 97%, 98%, 99% or 100% identical to the nucleotide sequence set forth in SEQ ID NO: 786. In some embodiments, the nucleotide sequence of the sense strand is at least 97%, identical to the nucleotide sequence set forth in SEQ ID NO: 786. In some embodiments, the nucleotide sequence of the sense strand is at least 98% identical to the nucleotide sequence set forth in SEQ ID NO: 786. In some embodiments, the nucleotide sequence of the sense strand is at least 99% identical to the nucleotide sequence set forth in SEQ ID NO: 786. In some embodiments, the nucleotide sequence of the sense strand is 100% identical to the nucleotide sequence set forth in SEQ ID NO: 786.

[0386] In some embodiments, the nucleotide sequence of the sense strand comprises the nucleotide sequence set forth in SEQ ID NO: 786. In some embodiments, the nucleotide sequence of the sense strand consists of the nucleotide sequence set forth in SEQ ID NO: 786.

[0387] Table 2 or Table 3 further identifies the target nucleic acid molecule within the cited reference CIDEB mRNA transcript (SEQ ID NO: 1) targeted by each of the sense strands. As such, the disclosure further provides an sense strand wherein the nucleotide sequence of the sense strand differs by no more than 5 (e.g., 0, 1, 2, 3, 4, or 5 (e.g., no more than 3 (e.g., 0, 1, 2, or 3))) nucleotides from the nucleotide sequence set forth in SEQ ID NO: 786 and further comprising additional nucleotide sequences (e.g., comprising from about 1-10, 1-9, 1-8, 1-7, 1-6, 1-5, 1-4, 1-3, or 1-2 nucleotides) at least partially complementary to the region contiguous (e.g., either at the 3′ end, the 5′ end, or both the 3′ and 5′ end) of the CIDEB mRNA transcript targeted by the select sense strand.

[0388] In some embodiments, the sense strand comprises at least 15 (e.g., 15, 16, 17, 18, 19, 20, 21, 22, 23, 24, 25, 26, 27, 28, 29, 30 (e.g., 19, 20, 21, 22, 23 (e.g., 23))) contiguous nucleotides differing by no more than 3 (e.g., 0, 1, 2, or 3) nucleotides from the nucleotide sequence set forth in SEQ ID NO: 786. In some embodiments, the sense strand comprises at least 19 (e.g., 20, 21, 22, 23, 24, 25, 26, 27, 28, 29, 30 (e.g., 19, 20, 21, 22, 23 (e.g., 23))) contiguous nucleotides differing by no more than 3 (e.g., 0, 1, 2, or 3) nucleotides from the nucleotide sequence of any one of the sense strands set forth in SEQ ID NO: 786. In some embodiments, the sense strand comprises at least 21 (e.g., 22, 23, 24, 25, 26, 27, 28, 29, 30 (e.g., 21, 22, 23 (e.g., 23))) contiguous nucleotides differing by no more than 3 (e.g., 0, 1, 2, or 3) nucleotides from the nucleotide sequence set forth in SEQ ID NO: 786. In some embodiments, the sense strand comprises at least 23 (e.g., 24, 25, 26, 27, 28, 29, 30) contiguous nucleotides differing by no more than 3 (e.g., 0, 1, 2, or 3) nucleotides from the nucleotide sequence set forth in SEQ ID NO: 786.

[0389] In some embodiments, the sense strand comprises from about 15-23 (e.g., 15-22, 15-21, 15-20, 15-19, 15-18, 15-17, 15-16, 16-22, 16-20, 16-19, 16-18, 16-17, 17-23, 17-22, 17-21, 17-20, 17-19, 17-18, 18-23, 18-22, 18-21, 18-20, 18-19, 19-23, 19-22, 19-21, 19-20, 20-23, 20-22, 20-21, 21-23, 21-22, 22-23) contiguous nucleotides differing by no more than 3 (e.g., 0, 1, 2, or 3) nucleotides from the nucleotide sequence set forth in SEQ ID NO: 786. In some embodiments, the sense strand comprises from about 19-23 (e.g., 19-22, 19-21, 19-20, 20-23, 20-22, 20-21, 21-23, 21-22, 22-23) contiguous nucleotides differing by no more than 3 (e.g., 0, 1, 2, or 3) nucleotides from the nucleotide sequence set forth in SEQ ID NO: 786. In some embodiments, the sense strand comprises from about 21-23 (e.g., 21-22, 22-23) contiguous nucleotides differing by no more than 3 (e.g., 0, 1, 2, or 3) nucleotides from the nucleotide sequence set forth in SEQ ID NO: 786.

[0390] In some embodiments, the nucleotide sequence of the sense strand comprises the nucleotide sequence set forth in SEQ ID NO: 786 differing by no more than 3 (e.g., 0, 1, 2, or 3) nucleotides from the nucleotide sequence set forth in SEQ ID NO: 786. In some embodiments, the nucleotide sequence of the sense strand comprises the nucleotide sequence set forth in SEQ ID NO: 786.

[0391] As described above, Table 2 or Table 3 further identifies the target nucleic acid molecule within the reference CIDEB mRNA transcript at least partially identical to each of the sense strands. As such, disclosure further provides sense strands comprising at least 15 (e.g., 15, 16, 17, 18, 19, 20, 21, 22, 23, 24, 25, 26, 27, 28, 29, 30 (e.g., 19, 20, 21, 22, 23 (e.g., 23))) contiguous nucleotides differing by no more than 3 (e.g., 0, 1, 2, or 3) nucleotides from the nucleotide sequence set forth in SEQ ID NO: 786 and further comprising additional nucleotide sequences (e.g., comprising from about 1-10, 1-9, 1-8, 1-7, 1-6, 1-5, 1-4, 1-3, or 1-2 nucleotides) at least partially identical to the region contiguous (e.g., either at the 3′ end, the 5′ end, or both the 3′ and 5′ end) of the CIDEB mRNA transcript identical to the select sense strand.

[0392] In some embodiments, the nucleotide sequence of the sense strand differs by no more than 5 (e.g., 0, 1, 2, 3, 4, or 5) nucleotides from the nucleotide sequence set forth in SEQ ID NO: 1192. In some embodiments, the nucleotide sequence of the sense strand differs by no more than 3 (e.g., 0, 1, 2, or 3) nucleotides from the nucleotide sequence set forth in SEQ ID NO: 1192. In some embodiments, the nucleotide sequence of the sense strand differs by no more than 2 (e.g., 0, 1, or 2) nucleotides from the nucleotide sequence set forth in SEQ ID NO: 1192. In some embodiments, the nucleotide sequence of the sense strand differs by no more than 1 (e.g., 0 or 1) nucleotide from the nucleotide sequence set forth in SEQ ID NO: 1192.

[0393] In some embodiments, the nucleotide sequence of the sense strand comprises the nucleotide sequence set forth in SEQ ID NO: 1192 differing by no more than 5 (e.g., 0, 1, 2, 3, 4, or 5) nucleotides from the nucleotide sequence set forth in SEQ ID NO: 1192. In some embodiments, the nucleotide sequence of the sense strand comprises the nucleotide sequence set forth in SEQ ID NO: 1192 differing by no more than 3 (e.g., 0, 1, 2, or 3) nucleotides from the nucleotide sequence set forth in SEQ ID NO: 1192. In some embodiments, the nucleotide sequence of the sense strand comprises the nucleotide sequence set forth in SEQ ID NO: 1192 differing by no more than 2 (e.g., 0, 1, or 2) nucleotides from the nucleotide sequence set forth in SEQ ID NO: 1192. In some embodiments, the nucleotide sequence of the sense strand comprises the nucleotide sequence set forth in SEQ ID NO: 1192 differing by no more than 1 (e.g., 0 or 1) nucleotide from nucleotide sequence set forth in SEQ ID NO: 1192.

[0394] In some embodiments, the nucleotide sequence of the sense strand is at least 85%, 86%, 87%, 88%, 89%, 90%, 91%, 92%, 93%, 94%, 95%, 96%, 97%, 98%, 99% or 100% identical to the nucleotide sequence set forth in SEQ ID NO: 1192. In some embodiments, the nucleotide sequence of the sense strand is at least 90%, 91%, 92%, 93%, 94%, 95%, 96%, 97%, 98%, 99% or 100% identical to the nucleotide sequence set forth in SEQ ID NO: 1192. In some embodiments, the nucleotide sequence of the sense strand is at least 95%, 96%, 97%, 98%, 99% or 100% identical to the nucleotide sequence set forth in SEQ ID NO: 1192. In some embodiments, the nucleotide sequence of the sense strand is at least 96%, 97%, 98%, 99% or 100% identical to the nucleotide sequence set forth in SEQ ID NO: 1192. In some embodiments, the nucleotide sequence of the sense strand is at least 97%, identical to the nucleotide sequence set forth in SEQ ID NO: 1192. In some embodiments, the nucleotide sequence of the sense strand is at least 98% identical to the nucleotide sequence set forth in SEQ ID NO: 1192. In some embodiments, the nucleotide sequence of the sense strand is at least 99% identical to the nucleotide sequence set forth in SEQ ID NO: 1192. In some embodiments, the nucleotide sequence of the sense strand is 100% identical to the nucleotide sequence set forth in SEQ ID NO: 1192.

[0395] In some embodiments, the nucleotide sequence of the sense strand comprises the nucleotide sequence set forth in SEQ ID NO: 1192. In some embodiments, the nucleotide sequence of the sense strand consists of the nucleotide sequence set forth in SEQ ID NO: 1192.

[0396] Table 2 or Table 3 further identifies the target nucleic acid molecule within the cited reference CIDEB mRNA transcript (SEQ ID NO: 1) targeted by each of the sense strands. As such, the disclosure further provides an sense strand wherein the nucleotide sequence of the sense strand differs by no more than 5 (e.g., 0, 1, 2, 3, 4, or 5 (e.g., no more than 3 (e.g., 0, 1, 2, or 3))) nucleotides from the nucleotide sequence set forth in SEQ ID NO: 1192 and further comprising additional nucleotide sequences (e.g., comprising from about 1-10, 1-9, 1-8, 1-7, 1-6, 1-5, 1-4, 1-3, or 1-2 nucleotides) at least partially complementary to the region contiguous (e.g., either at the 3′ end, the 5′ end, or both the 3′ and 5′ end) of the CIDEB mRNA transcript targeted by the select sense strand.

[0397] In some embodiments, the sense strand comprises at least 15 (e.g., 15, 16, 17, 18, 19, 20, 21, 22, 23, 24, 25, 26, 27, 28, 29, 30 (e.g., 19, 20, 21, 22, 23 (e.g., 23))) contiguous nucleotides differing by no more than 3 (e.g., 0, 1, 2, or 3) nucleotides from the nucleotide sequence set forth in SEQ ID NO: 1192. In some embodiments, the sense strand comprises at least 19 (e.g., 20, 21, 22, 23, 24, 25, 26, 27, 28, 29, 30 (e.g., 19, 20, 21, 22, 23 (e.g., 23))) contiguous nucleotides differing by no more than 3 (e.g., 0, 1, 2, or 3) nucleotides from the nucleotide sequence of any one of the sense strands set forth in SEQ ID NO: 1192. In some embodiments, the sense strand comprises at least 21 (e.g., 22, 23, 24, 25, 26, 27, 28, 29, 30 (e.g., 21, 22, 23 (e.g., 23))) contiguous nucleotides differing by no more than 3 (e.g., 0, 1, 2, or 3) nucleotides from the nucleotide sequence set forth in SEQ ID NO: 1192. In some embodiments, the sense strand comprises at least 23 (e.g., 24, 25, 26, 27, 28, 29, 30) contiguous nucleotides differing by no more than 3 (e.g., 0, 1, 2, or 3) nucleotides from the nucleotide sequence set forth in SEQ ID NO: 1192.

[0398] In some embodiments, the sense strand comprises from about 15-23 (e.g., 15-22, 15-21, 15-20, 15-19, 15-18, 15-17, 15-16, 16-22, 16-20, 16-19, 16-18, 16-17, 17-23, 17-22, 17-21, 17-20, 17-19, 17-18, 18-23, 18-22, 18-21, 18-20, 18-19, 19-23, 19-22, 19-21, 19-20, 20-23, 20-22, 20-21, 21-23, 21-22, 22-23) contiguous nucleotides differing by no more than 3 (e.g., 0, 1, 2, or 3) nucleotides from the nucleotide sequence set forth in SEQ ID NO: 1192. In some embodiments, the sense strand comprises from about 19-23 (e.g., 19-22, 19-21, 19-20, 20-23, 20-22, 20-21, 21-23, 21-22, 22-23) contiguous nucleotides differing by no more than 3 (e.g., 0, 1, 2, or 3) nucleotides from the nucleotide sequence set forth in SEQ ID NO: 1192. In some embodiments, the sense strand comprises from about 21-23 (e.g., 21-22, 22-23) contiguous nucleotides differing by no more than 3 (e.g., 0, 1, 2, or 3) nucleotides from the nucleotide sequence set forth in SEQ ID NO: 1192.

[0399] In some embodiments, the nucleotide sequence of the sense strand comprises the nucleotide sequence set forth in SEQ ID NO: 1192 differing by no more than 3 (e.g., 0, 1, 2, or 3) nucleotides from the nucleotide sequence set forth in SEQ ID NO: 1192. In some embodiments, the nucleotide sequence of the sense strand comprises the nucleotide sequence set forth in SEQ ID NO: 1192.

[0400] As described above, Table 2 or Table 3 further identifies the target nucleic acid molecule within the reference CIDEB mRNA transcript at least partially identical to each of the sense strands. As such, disclosure further provides sense strands comprising at least 15 (e.g., 15, 16, 17, 18, 19, 20, 21, 22, 23, 24, 25, 26, 27, 28, 29, 30 (e.g., 19, 20, 21, 22, 23 (e.g., 23))) contiguous nucleotides differing by no more than 3 (e.g., 0, 1, 2, or 3) nucleotides from the nucleotide sequence set forth in SEQ ID NO: 1192 and further comprising additional nucleotide sequences (e.g., comprising from about 1-10, 1-9, 1-8, 1-7, 1-6, 1-5, 1-4, 1-3, or 1-2 nucleotides) at least partially identical to the region contiguous (e.g., either at the 3′ end, the 5′ end, or both the 3′ and 5′ end) of the CIDEB mRNA transcript identical to the select sense strand.

[0401] In some embodiments, the nucleotide sequence of the sense strand differs by no more than 5 (e.g., 0, 1, 2, 3, 4, or 5) nucleotides from the nucleotide sequence set forth in SEQ ID NO: 792. In some embodiments, the nucleotide sequence of the sense strand differs by no more than 3 (e.g., 0, 1, 2, or 3) nucleotides from the nucleotide sequence set forth in SEQ ID NO: 792. In some embodiments, the nucleotide sequence of the sense strand differs by no more than 2 (e.g., 0, 1, or 2) nucleotides from the nucleotide sequence set forth in SEQ ID NO: 792. In some embodiments, the nucleotide sequence of the sense strand differs by no more than 1 (e.g., 0 or 1) nucleotide from the nucleotide sequence set forth in SEQ ID NO: 792.

[0402] In some embodiments, the nucleotide sequence of the sense strand comprises the nucleotide sequence set forth in SEQ ID NO: 792 differing by no more than 5 (e.g., 0, 1, 2, 3, 4, or 5) nucleotides from the nucleotide sequence set forth in SEQ ID NO: 792. In some embodiments, the nucleotide sequence of the sense strand comprises the nucleotide sequence set forth in SEQ ID NO: 792 differing by no more than 3 (e.g., 0, 1, 2, or 3) nucleotides from the nucleotide sequence set forth in SEQ ID NO: 792. In some embodiments, the nucleotide sequence of the sense strand comprises the nucleotide sequence set forth in SEQ ID NO: 792 differing by no more than 2 (e.g., 0, 1, or 2) nucleotides from the nucleotide sequence set forth in SEQ ID NO: 792. In some embodiments, the nucleotide sequence of the sense strand comprises the nucleotide sequence set forth in SEQ ID NO: 792 differing by no more than 1 (e.g., 0 or 1) nucleotide from nucleotide sequence set forth in SEQ ID NO: 792.

[0403] In some embodiments, the nucleotide sequence of the sense strand is at least 85%, 86%, 87%, 88%, 89%, 90%, 91%, 92%, 93%, 94%, 95%, 96%, 97%, 98%, 99% or 100% identical to the nucleotide sequence set forth in SEQ ID NO: 792. In some embodiments, the nucleotide sequence of the sense strand is at least 90%, 91%, 92%, 93%, 94%, 95%, 96%, 97%, 98%, 99% or 100% identical to the nucleotide sequence set forth in SEQ ID NO: 792. In some embodiments, the nucleotide sequence of the sense strand is at least 95%, 96%, 97%, 98%, 99% or 100% identical to the nucleotide sequence set forth in SEQ ID NO: 792. In some embodiments, the nucleotide sequence of the sense strand is at least 96%, 97%, 98%, 99% or 100% identical to the nucleotide sequence set forth in SEQ ID NO: 792. In some embodiments, the nucleotide sequence of the sense strand is at least 97%, identical to the nucleotide sequence set forth in SEQ ID NO: 792. In some embodiments, the nucleotide sequence of the sense strand is at least 98% identical to the nucleotide sequence set forth in SEQ ID NO: 792. In some embodiments, the nucleotide sequence of the sense strand is at least 99% identical to the nucleotide sequence set forth in SEQ ID NO: 792. In some embodiments, the nucleotide sequence of the sense strand is 100% identical to the nucleotide sequence set forth in SEQ ID NO: 792.

[0404] In some embodiments, the nucleotide sequence of the sense strand comprises the nucleotide sequence set forth in SEQ ID NO: 792. In some embodiments, the nucleotide sequence of the sense strand consists of the nucleotide sequence set forth in SEQ ID NO: 792.

[0405] Table 2 or Table 3 further identifies the target nucleic acid molecule within the cited reference CIDEB mRNA transcript (SEQ ID NO: 1) targeted by each of the sense strands. As such, the disclosure further provides an sense strand wherein the nucleotide sequence of the sense strand differs by no more than 5 (e.g., 0, 1, 2, 3, 4, or 5 (e.g., no more than 3 (e.g., 0, 1, 2, or 3))) nucleotides from the nucleotide sequence set forth in SEQ ID NO: 792 and further comprising additional nucleotide sequences (e.g., comprising from about 1-10, 1-9, 1-8, 1-7, 1-6, 1-5, 1-4, 1-3, or 1-2 nucleotides) at least partially complementary to the region contiguous (e.g., either at the 3′ end, the 5′ end, or both the 3′ and 5′ end) of the CIDEB mRNA transcript targeted by the select sense strand.

[0406] In some embodiments, the sense strand comprises at least 15 (e.g., 15, 16, 17, 18, 19, 20, 21, 22, 23, 24, 25, 26, 27, 28, 29, 30 (e.g., 19, 20, 21, 22, 23 (e.g., 23))) contiguous nucleotides differing by no more than 3 (e.g., 0, 1, 2, or 3) nucleotides from the nucleotide sequence set forth in SEQ ID NO: 792. In some embodiments, the sense strand comprises at least 19 (e.g., 20, 21, 22, 23, 24, 25, 26, 27, 28, 29, 30 (e.g., 19, 20, 21, 22, 23 (e.g., 23))) contiguous nucleotides differing by no more than 3 (e.g., 0, 1, 2, or 3) nucleotides from the nucleotide sequence of any one of the sense strands set forth in SEQ ID NO: 792. In some embodiments, the sense strand comprises at least 21 (e.g., 22, 23, 24, 25, 26, 27, 28, 29, 30 (e.g., 21, 22, 23 (e.g., 23))) contiguous nucleotides differing by no more than 3 (e.g., 0, 1, 2, or 3) nucleotides from the nucleotide sequence set forth in SEQ ID NO: 792. In some embodiments, the sense strand comprises at least 23 (e.g., 24, 25, 26, 27, 28, 29, 30) contiguous nucleotides differing by no more than 3 (e.g., 0, 1, 2, or 3) nucleotides from the nucleotide sequence set forth in SEQ ID NO: 792.

[0407] In some embodiments, the sense strand comprises from about 15-23 (e.g., 15-22, 15-21, 15-20, 15-19, 15-18, 15-17, 15-16, 16-22, 16-20, 16-19, 16-18, 16-17, 17-23, 17-22, 17-21, 17-20, 17-19, 17-18, 18-23, 18-22, 18-21, 18-20, 18-19, 19-23, 19-22, 19-21, 19-20, 20-23, 20-22, 20-21, 21-23, 21-22, 22-23) contiguous nucleotides differing by no more than 3 (e.g., 0, 1, 2, or 3) nucleotides from the nucleotide sequence set forth in SEQ ID NO: 792. In some embodiments, the sense strand comprises from about 19-23 (e.g., 19-22, 19-21, 19-20, 20-23, 20-22, 20-21, 21-23, 21-22, 22-23) contiguous nucleotides differing by no more than 3 (e.g., 0, 1, 2, or 3) nucleotides from the nucleotide sequence set forth in SEQ ID NO: 792. In some embodiments, the sense strand comprises from about 21-23 (e.g., 21-22, 22-23) contiguous nucleotides differing by no more than 3 (e.g., 0, 1, 2, or 3) nucleotides from the nucleotide sequence set forth in SEQ ID NO: 792.

[0408] In some embodiments, the nucleotide sequence of the sense strand comprises the nucleotide sequence set forth in SEQ ID NO: 792 differing by no more than 3 (e.g., 0, 1, 2, or 3) nucleotides from the nucleotide sequence set forth in SEQ ID NO: 792. In some embodiments, the nucleotide sequence of the sense strand comprises the nucleotide sequence set forth in SEQ ID NO: 792.

[0409] As described above, Table 2 or Table 3 further identifies the target nucleic acid molecule within the reference CIDEB mRNA transcript at least partially identical to each of the sense strands. As such, disclosure further provides sense strands comprising at least 15 (e.g., 15, 16, 17, 18, 19, 20, 21, 22, 23, 24, 25, 26, 27, 28, 29, 30 (e.g., 19, 20, 21, 22, 23 (e.g., 23))) contiguous nucleotides differing by no more than 3 (e.g., 0, 1, 2, or 3) nucleotides from the nucleotide sequence set forth in SEQ ID NO: 792 and further comprising additional nucleotide sequences (e.g., comprising from about 1-10, 1-9, 1-8, 1-7, 1-6, 1-5, 1-4, 1-3, or 1-2 nucleotides) at least partially identical to the region contiguous (e.g., either at the 3′ end, the 5′ end, or both the 3′ and 5′ end) of the CIDEB mRNA transcript identical to the select sense strand.

[0410] In some embodiments, the nucleotide sequence of the sense strand differs by no more than 5 (e.g., 0, 1, 2, 3, 4, or 5) nucleotides from the nucleotide sequence set forth in SEQ ID NO: 827. In some embodiments, the nucleotide sequence of the sense strand differs by no more than 3 (e.g., 0, 1, 2, or 3) nucleotides from the nucleotide sequence set forth in SEQ ID NO: 827. In some embodiments, the nucleotide sequence of the sense strand differs by no more than 2 (e.g., 0, 1, or 2) nucleotides from the nucleotide sequence set forth in SEQ ID NO: 827. In some embodiments, the nucleotide sequence of the sense strand differs by no more than 1 (e.g., 0 or 1) nucleotide from the nucleotide sequence set forth in SEQ ID NO: 827.

[0411] In some embodiments, the nucleotide sequence of the sense strand comprises the nucleotide sequence set forth in SEQ ID NO: 827 differing by no more than 5 (e.g., 0, 1, 2, 3, 4, or 5) nucleotides from the nucleotide sequence set forth in SEQ ID NO: 827. In some embodiments, the nucleotide sequence of the sense strand comprises the nucleotide sequence set forth in SEQ ID NO: 827 differing by no more than 3 (e.g., 0, 1, 2, or 3) nucleotides from the nucleotide sequence set forth in SEQ ID NO: 827. In some embodiments, the nucleotide sequence of the sense strand comprises the nucleotide sequence set forth in SEQ ID NO: 827 differing by no more than 2 (e.g., 0, 1, or 2) nucleotides from the nucleotide sequence set forth in SEQ ID NO: 827. In some embodiments, the nucleotide sequence of the sense strand comprises the nucleotide sequence set forth in SEQ ID NO: 827 differing by no more than 1 (e.g., 0 or 1) nucleotide from nucleotide sequence set forth in SEQ ID NO: 827.

[0412] In some embodiments, the nucleotide sequence of the sense strand is at least 85%, 86%, 87%, 88%, 89%, 90%, 91%, 92%, 93%, 94%, 95%, 96%, 97%, 98%, 99% or 100% identical to the nucleotide sequence set forth in SEQ ID NO: 827. In some embodiments, the nucleotide sequence of the sense strand is at least 90%, 91%, 92%, 93%, 94%, 95%, 96%, 97%, 98%, 99% or 100% identical to the nucleotide sequence set forth in SEQ ID NO: 827. In some embodiments, the nucleotide sequence of the sense strand is at least 95%, 96%, 97%, 98%, 99% or 100% identical to the nucleotide sequence set forth in SEQ ID NO: 827. In some embodiments, the nucleotide sequence of the sense strand is at least 96%, 97%, 98%, 99% or 100% identical to the nucleotide sequence set forth in SEQ ID NO: 827. In some embodiments, the nucleotide sequence of the sense strand is at least 97%, identical to the nucleotide sequence set forth in SEQ ID NO: 827. In some embodiments, the nucleotide sequence of the sense strand is at least 98% identical to the nucleotide sequence set forth in SEQ ID NO: 827. In some embodiments, the nucleotide sequence of the sense strand is at least 99% identical to the nucleotide sequence set forth in SEQ ID NO: 827. In some embodiments, the nucleotide sequence of the sense strand is 100% identical to the nucleotide sequence set forth in SEQ ID NO: 827.

[0413] In some embodiments, the nucleotide sequence of the sense strand comprises the nucleotide sequence set forth in SEQ ID NO: 827. In some embodiments, the nucleotide sequence of the sense strand consists of the nucleotide sequence set forth in SEQ ID NO: 827.

[0414] Table 2 or Table 3 further identifies the target nucleic acid molecule within the cited reference CIDEB mRNA transcript (SEQ ID NO: 1) targeted by each of the sense strands. As such, the disclosure further provides an sense strand wherein the nucleotide sequence of the sense strand differs by no more than 5 (e.g., 0, 1, 2, 3, 4, or 5 (e.g., no more than 3 (e.g., 0, 1, 2, or 3))) nucleotides from the nucleotide sequence set forth in SEQ ID NO: 827 and further comprising additional nucleotide sequences (e.g., comprising from about 1-10, 1-9, 1-8, 1-7, 1-6, 1-5, 1-4, 1-3, or 1-2 nucleotides) at least partially complementary to the region contiguous (e.g., either at the 3′ end, the 5′ end, or both the 3′ and 5′ end) of the CIDEB mRNA transcript targeted by the select sense strand.

[0415] In some embodiments, the sense strand comprises at least 15 (e.g., 15, 16, 17, 18, 19, 20, 21, 22, 23, 24, 25, 26, 27, 28, 29, 30 (e.g., 19, 20, 21, 22, 23 (e.g., 23))) contiguous nucleotides differing by no more than 3 (e.g., 0, 1, 2, or 3) nucleotides from the nucleotide sequence set forth in SEQ ID NO: 827. In some embodiments, the sense strand comprises at least 19 (e.g., 20, 21, 22, 23, 24, 25, 26, 27, 28, 29, 30 (e.g., 19, 20, 21, 22, 23 (e.g., 23))) contiguous nucleotides differing by no more than 3 (e.g., 0, 1, 2, or 3) nucleotides from the nucleotide sequence of any one of the sense strands set forth in SEQ ID NO: 827. In some embodiments, the sense strand comprises at least 21 (e.g., 22, 23, 24, 25, 26, 27, 28, 29, 30 (e.g., 21, 22, 23 (e.g., 23))) contiguous nucleotides differing by no more than 3 (e.g., 0, 1, 2, or 3) nucleotides from the nucleotide sequence set forth in SEQ ID NO: 827. In some embodiments, the sense strand comprises at least 23 (e.g., 24, 25, 26, 27, 28, 29, 30) contiguous nucleotides differing by no more than 3 (e.g., 0, 1, 2, or 3) nucleotides from the nucleotide sequence set forth in SEQ ID NO: 827.

[0416] In some embodiments, the sense strand comprises from about 15-23 (e.g., 15-22, 15-21, 15-20, 15-19, 15-18, 15-17, 15-16, 16-22, 16-20, 16-19, 16-18, 16-17, 17-23, 17-22, 17-21, 17-20, 17-19, 17-18, 18-23, 18-22, 18-21, 18-20, 18-19, 19-23, 19-22, 19-21, 19-20, 20-23, 20-22, 20-21, 21-23, 21-22, 22-23) contiguous nucleotides differing by no more than 3 (e.g., 0, 1, 2, or 3) nucleotides from the nucleotide sequence set forth in SEQ ID NO: 827. In some embodiments, the sense strand comprises from about 19-23 (e.g., 19-22, 19-21, 19-20, 20-23, 20-22, 20-21, 21-23, 21-22, 22-23) contiguous nucleotides differing by no more than 3 (e.g., 0, 1, 2, or 3) nucleotides from the nucleotide sequence set forth in SEQ ID NO: 827. In some embodiments, the sense strand comprises from about 21-23 (e.g., 21-22, 22-23) contiguous nucleotides differing by no more than 3 (e.g., 0, 1, 2, or 3) nucleotides from the nucleotide sequence set forth in SEQ ID NO: 827.

[0417] In some embodiments, the nucleotide sequence of the sense strand comprises the nucleotide sequence set forth in SEQ ID NO: 827 differing by no more than 3 (e.g., 0, 1, 2, or 3) nucleotides from the nucleotide sequence set forth in SEQ ID NO: 827. In some embodiments, the nucleotide sequence of the sense strand comprises the nucleotide sequence set forth in SEQ ID NO: 827.

[0418] As described above, Table 2 or Table 3 further identifies the target nucleic acid molecule within the reference CIDEB mRNA transcript at least partially identical to each of the sense strands. As such, disclosure further provides sense strands comprising at least 15 (e.g., 15, 16, 17, 18, 19, 20, 21, 22, 23, 24, 25, 26, 27, 28, 29, 30 (e.g., 19, 20, 21, 22, 23 (e.g., 23))) contiguous nucleotides differing by no more than 3 (e.g., 0, 1, 2, or 3) nucleotides from the nucleotide sequence set forth in SEQ ID NO: 827 and further comprising additional nucleotide sequences (e.g., comprising from about 1-10, 1-9, 1-8, 1-7, 1-6, 1-5, 1-4, 1-3, or 1-2 nucleotides) at least partially identical to the region contiguous (e.g., either at the 3′ end, the 5′ end, or both the 3′ and 5′ end) of the CIDEB mRNA transcript identical to the select sense strand.

[0419] In some embodiments, the nucleotide sequence of the sense strand differs by no more than 5 (e.g., 0, 1, 2, 3, 4, or 5) nucleotides from the nucleotide sequence of any one of the sense strands of any one of dsRNA agents 1-482. In some embodiments, the nucleotide sequence of the sense strand differs by no more than 3 (e.g., 0, 1, 2, or 3) nucleotides from the nucleotide sequence of any one of the sense strands of any one of dsRNA agents 1-482. In some embodiments, the nucleotide sequence of the sense strand differs by no more than 2 (e.g., 0, 1, or 2) nucleotides from the nucleotide sequence of any one of the sense strands of any one of dsRNA agents 1-482. In some embodiments, the nucleotide sequence of the sense strand differs by no more than 1 (e.g., 0 or 1) nucleotide from the nucleotide sequence of any one of the sense strands of any one of dsRNA agents 1-482.

[0420] In some embodiments, the nucleotide sequence of the sense strand comprises the nucleotide sequence of any one of the sense strands of any one of dsRNA agents 1-482 differing by no more than 5 (e.g., 0, 1, 2, 3, 4, or 5) nucleotides from the sense strand of any one of dsRNA agents 1-482. In some embodiments, the nucleotide sequence of the sense strand comprises the nucleotide sequence of any one of the sense strands of any one of dsRNA agents 1-482 differing by no more than 3 (e.g., 0, 1, 2, or 3) nucleotides from the sense strand of any one of dsRNA agents 1-482. In some embodiments, the nucleotide sequence of the sense strand comprises the nucleotide sequence of any one of the sense strands of any one of dsRNA agents 1-482 differing by no more than 2 (e.g., 0, 1, or 2) nucleotides from the sense strand of any one of dsRNA agents 1-482. In some embodiments, the nucleotide sequence of the sense strand comprises the nucleotide sequence of any one of the sense strands of any one of dsRNA agents 1-482 differing by no more than 1 (e.g., 0 or 1) nucleotide from the sense strand of any one of dsRNA agents 1-482.

[0421] In some embodiments, the nucleotide sequence of the sense strand is at least 85%, 86%, 87%, 88%, 89%, 90%, 91%, 92%, 93%, 94%, 95%, 96%, 97%, 98%, 99% or 100% identical to the nucleotide sequence of any one of the sense strands of any one of dsRNA agents 1-482. In some embodiments, the nucleotide sequence of the sense strand is at least 90%, 91%, 92%, 93%, 94%, 95%, 96%, 97%, 98%, 99% or 100% identical to the nucleotide sequence of any one of the sense strands of any one of dsRNA agents 1-482. In some embodiments, the nucleotide sequence of the sense strand is at least 95%, 96%, 97%, 98%, 99% or 100% identical to the nucleotide sequence of any one of the sense strands of any one of dsRNA agents 1-482. In some embodiments, the nucleotide sequence of the sense strand is at least 96%, 97%, 98%, 99% or 100% identical to the nucleotide sequence of any one of the sense strands of any one of dsRNA agents 1-482. In some embodiments, the nucleotide sequence of the sense strand is at least 97%, identical to the nucleotide sequence of any one of the sense strands of any one of dsRNA agents 1-482. In some embodiments, the nucleotide sequence of the sense strand is at least 98% identical to the nucleotide sequence of any one of the sense strands of any one of dsRNA agents 1-482. In some embodiments, the nucleotide sequence of the sense strand is at least 99% identical to the nucleotide sequence of any one of the sense strands of any one of dsRNA agents 1-482. In some embodiments, the nucleotide sequence of the sense strand is 100% identical to the nucleotide sequence of any one of the sense strands of any one of dsRNA agents 1-482.

[0422] In some embodiments, the nucleotide sequence of the sense strand comprises the nucleotide sequence of any one of the sense strands of any one of dsRNA agents 1-482. In some embodiments, the nucleotide sequence of the sense strand consists of the nucleotide sequence of any one of the sense strands of any one of dsRNA agents 1-482.

[0423] Table 2 or Table 3 further identifies the target nucleic acid molecule within the cited reference CIDEB mRNA transcript (SEQ ID NO: 1) targeted by each of the sense strands. As such, the disclosure further provides sense strands wherein the nucleotide sequence of the sense strand differs by no more than 5 (e.g., 0, 1, 2, 3, 4, or 5 (e.g., no more than 3 (e.g., 0, 1, 2, or 3))) nucleotides from the nucleotide sequence of any one of the sense strands of any one of dsRNA agents 1-482 and further comprising additional nucleotide sequences (e.g., comprising from about 1-10, 1-9, 1-8, 1-7, 1-6, 1-5, 1-4, 1-3, or 1-2 nucleotides) at least partially complementary to the region contiguous (e.g., either at the 3′ end, the 5′ end, or both the 3′ and 5′ end) of the CIDEB mRNA transcript targeted by the select sense strand.

[0424] In some embodiments, the sense strand comprises at least 15 (e.g., 15, 16, 17, 18, 19, 20, 21, 22, 23, 24, 25, 26, 27, 28, 29, 30 (e.g., 19, 20, 21, 22, 23 (e.g., 23))) contiguous nucleotides differing by no more than 3 (e.g., 0, 1, 2, or 3) nucleotides from the nucleotide sequence of any one of the sense strands of any one of dsRNA agents 1-482. In some embodiments, the sense strand comprises at least 19 (e.g., 20, 21, 22, 23, 24, 25, 26, 27, 28, 29, 30 (e.g., 19, 20, 21, 22, 23 (e.g., 23))) contiguous nucleotides differing by no more than 3 (e.g., 0, 1, 2, or 3) nucleotides from the nucleotide sequence of any one of the sense strands of any one of dsRNA agents 1-482. In some embodiments, the sense strand comprises at least 21 (e.g., 22, 23, 24, 25, 26, 27, 28, 29, 30 (e.g., 21, 22, 23 (e.g., 23))) contiguous nucleotides differing by no more than 3 (e.g., 0, 1, 2, or 3) nucleotides from the nucleotide sequence of any one of the sense strands of any one of dsRNA agents 1-482. In some embodiments, the sense strand comprises at least 23 (e.g., 24, 25, 26, 27, 28, 29, 30) contiguous nucleotides differing by no more than 3 (e.g., 0, 1, 2, or 3) nucleotides from the nucleotide sequence of any one of the sense strands of any one of dsRNA agents 1-482.

[0425] In some embodiments, the sense strand comprises from about 15-23 (e.g., 15-22, 15-21, 15-20, 15-19, 15-18, 15-17, 15-16, 16-22, 16-20, 16-19, 16-18, 16-17, 17-23, 17-22, 17-21, 17-20, 17-19, 17-18, 18-23, 18-22, 18-21, 18-20, 18-19, 19-23, 19-22, 19-21, 19-20, 20-23, 20-22, 20-21, 21-23, 21-22, 22-23) contiguous nucleotides differing by no more than 3 (e.g., 0, 1, 2, or 3) nucleotides from the nucleotide sequence of any one of the sense strands of any one of dsRNA agents 1-482. In some embodiments, the sense strand comprises from about 19-23 (e.g., 19-22, 19-21, 19-20, 20-23, 20-22, 20-21, 21-23, 21-22, 22-23) contiguous nucleotides differing by no more than 3 (e.g., 0, 1, 2, or 3) nucleotides from the nucleotide sequence of any one of the sense strands of any one of dsRNA agents 1-482. In some embodiments, the sense strand comprises from about 21-23 (e.g., 21-22, 22-23) contiguous nucleotides differing by no more than 3 (e.g., 0, 1, 2, or 3) nucleotides from the nucleotide sequence of any one of the sense strands of any one of dsRNA agents 1-482.

[0426] In some embodiments, the nucleotide sequence of the sense strand comprises the nucleotide sequence of any one of the sense strands of any one of dsRNA agents 1-482 differing by no more than 3 (e.g., 0, 1, 2, or 3) nucleotides from the sense strand. In some embodiments, the nucleotide sequence of the sense strand comprises the nucleotide sequence of any one of the sense strands of any one of dsRNA agents 1-482.

[0427] As described above, Table 2 or Table 3 further identifies the target nucleic acid molecule within the reference CIDEB mRNA transcript at least partially identical to each of the sense strands. As such, disclosure further provides sense strands comprising at least 15 (e.g., 15, 16, 17, 18, 19, 20, 21, 22, 23, 24, 25, 26, 27, 28, 29, 30 (e.g., 19, 20, 21, 22, 23 (e.g., 23))) contiguous nucleotides differing by no more than 3 (e.g., 0, 1, 2, or 3) nucleotides from the nucleotide sequence of any one of the sense strands of any one of dsRNA agents 1-482 and further comprising additional nucleotide sequences (e.g., comprising from about 1-10, 1-9, 1-8, 1-7, 1-6, 1-5, 1-4, 1-3, or 1-2 nucleotides) at least partially identical to the region contiguous (e.g., either at the 3′ end, the 5′ end, or both the 3′ and 5′ end) of the CIDEB mRNA transcript identical to the select sense strand.

[0428] In some embodiments, the sense strand comprises at least 15 (e.g., 15, 16, 17, 18, 19, 20, 21, 22, 23, 24, 25, 26, 27, 28, 29, 30 (e.g., 19, 20, 21, 22, 23 (e.g., 23))) contiguous nucleotides differing by no more than 3 (e.g., 0, 1, 2, or 3) nucleotides from the nucleotide sequence of any one of the sense strands of any one of dsRNA agents 129, 135, 169, 170, 409, 479, 480, 481, or 482. In some embodiments, the sense strand comprises at least 19 (e.g., 20, 21, 22, 23, 24, 25, 26, 27, 28, 29, 30 (e.g., 19, 20, 21, 22, 23 (e.g., 23))) contiguous nucleotides differing by no more than 3 (e.g., 0, 1, 2, or 3) nucleotides from the nucleotide sequence of any one of the sense strands of any one of dsRNA agents 129, 135, 169, 170, 409, 479, 480, 481, or 482. In some embodiments, the sense strand comprises at least 21 (e.g., 22, 23, 24, 25, 26, 27, 28, 29, 30 (e.g., 21, 22, 23 (e.g., 23))) contiguous nucleotides differing by no more than 3 (e.g., 0, 1, 2, or 3) nucleotides from the nucleotide sequence of any one of the sense strands of any one of dsRNA agents 129, 135, 169, 170, 409, 479, 480, 481, or 482. In some embodiments, the sense strand comprises at least 23 (e.g., 24, 25, 26, 27, 28, 29, 30) contiguous nucleotides differing by no more than 3 (e.g., 0, 1, 2, or 3) nucleotides from the nucleotide sequence of any one of the sense strands of any one of dsRNA agents 1-482.

[0429] In some embodiments, the nucleotide sequence of the sense strand differs by no more than 5 (e.g., 0, 1, 2, 3, 4, or 5) nucleotides from the nucleotide sequence of any one of the sense strands of any one of dsRNA agents 129, 135, 169, 170, 409, 479, 480, 481, or 482. In some embodiments, the nucleotide sequence of the sense strand differs by no more than 3 (e.g., 0, 1, 2, or 3) nucleotides from the nucleotide sequence of any one of the sense strands of any one of dsRNA agents 129, 135, 169, 170, 409, 479, 480, 481, or 482. In some embodiments, the nucleotide sequence of the sense strand differs by no more than 2 (e.g., 0, 1, or 2) nucleotides from the nucleotide sequence of any one of the sense strands of any one of dsRNA agents 129, 135, 169, 170, 409, 479, 480, 481, or 482. In some embodiments, the nucleotide sequence of the sense strand differs by no more than 1 (e.g., 0 or 1) nucleotide from the nucleotide sequence of any one of the sense strands of any one of dsRNA agents 129, 135, 169, 170, 409, 479, 480, 481, or 482.

[0430] In some embodiments, the nucleotide sequence of the sense strand comprises the nucleotide sequence of any one of the sense strands of any one of dsRNA agents 129, 135, 169, 170, 409, 479, 480, 481, or 482 differing by no more than 5 (e.g., 0, 1, 2, 3, 4, or 5) nucleotides from the sense strand of any one of dsRNA agents 129, 135, 169, 170, 409, 479, 480, 481, or 482. In some embodiments, the nucleotide sequence of the sense strand comprises the nucleotide sequence of any one of the sense strands of any one of dsRNA agents 129, 135, 169, 170, 409, 479, 480, 481, or 482 differing by no more than 3 (e.g., 0, 1, 2, or 3) nucleotides from the sense strand of any one of dsRNA agents 129, 135, 169, 170, 409, 479, 480, 481, or 482. In some embodiments, the nucleotide sequence of the sense strand comprises the nucleotide sequence of any one of the sense strands of any one of dsRNA agents 129, 135, 169, 170, 409, 479, 480, 481, or 482 differing by no more than 2 (e.g., 0, 1, or 2) nucleotides from the sense strand of any one of dsRNA agents 129, 135, 169, 170, 409, 479, 480, 481, or 482. In some embodiments, the nucleotide sequence of the sense strand comprises the nucleotide sequence of any one of the sense strands of any one of dsRNA agents 129, 135, 169, 170, 409, 479, 480, 481, or 482 differing by no more than 1 (e.g., 0 or 1) nucleotide from the sense strand of any one of dsRNA agents 129, 135, 169, 170, 409, 479, 480, 481, or 482.

[0431] In some embodiments, the nucleotide sequence of the sense strand is at least 85%, 86%, 87%, 88%, 89%, 90%, 91%, 92%, 93%, 94%, 95%, 96%, 97%, 98%, 99% or 100% identical to the nucleotide sequence of any one of the sense strands of any one of dsRNA agents 129, 135, 169, 170, 409, 479, 480, 481, or 482. In some embodiments, the nucleotide sequence of the sense strand is at least 90%, 91%, 92%, 93%, 94%, 95%, 96%, 97%, 98%, 99% or 100% identical to the nucleotide sequence of any one of the sense strands of any one of dsRNA agents 129, 135, 169, 170, 409, 479, 480, 481, or 482. In some embodiments, the nucleotide sequence of the sense strand is at least 95%, 96%, 97%, 98%, 99% or 100% identical to the nucleotide sequence of any one of the sense strands of any one of dsRNA agents 129, 135, 169, 170, 409, 479, 480, 481, or 482. In some embodiments, the nucleotide sequence of the sense strand is at least 96%, 97%, 98%, 99% or 100% identical to the nucleotide sequence of any one of the sense strands of any one of dsRNA agents 129, 135, 169, 170, 409, 479, 480, 481, or 482. In some embodiments, the nucleotide sequence of the sense strand is at least 97%, identical to the nucleotide sequence of any one of the sense strands of any one of dsRNA agents 129, 135, 169, 170, 409, 479, 480, 481, or 482. In some embodiments, the nucleotide sequence of the sense strand is at least 98% identical to the nucleotide sequence of any one of the sense strands of any one of dsRNA agents 129, 135, 169, 170, 409, 479, 480, 481, or 482. In some embodiments, the nucleotide sequence of the sense strand is at least 99% identical to the nucleotide sequence of any one of the sense strands of any one of dsRNA agents 129, 135, 169, 170, 409, 479, 480, 481, or 482. In some embodiments, the nucleotide sequence of the sense strand is 100% identical to the nucleotide sequence of any one of the sense strands of any one of dsRNA agents 129, 135, 169, 170, 409, 479, 480, 481, or 482.

[0432] In some embodiments, the nucleotide sequence of the sense strand comprises the nucleotide sequence of any one of the sense strands of any one of dsRNA agents 129, 135, 169, 170, 409, 479, 480, 481, or 482. In some embodiments, the nucleotide sequence of the sense strand consists of the nucleotide sequence of any one of the sense strands of any one of dsRNA agents 129, 135, 169, 170, 409, 479, 480, 481, or 482.

[0433] Table 2 or Table 3 further identifies the target nucleic acid molecule within the cited reference CIDEB mRNA transcript (SEQ ID NO: 1) targeted by each of the sense strands. As such, the disclosure further provides sense strands wherein the nucleotide sequence of the sense strand differs by no more than 5 (e.g., 0, 1, 2, 3, 4, or 5 (e.g., no more than 3 (e.g., 0, 1, 2, or 3))) nucleotides from the nucleotide sequence of any one of the sense strands of any one of dsRNA agents 129, 135, 169, 170, 409, 479, 480, 481, or 482 and further comprising additional nucleotide sequences (e.g., comprising from about 1-10, 1-9, 1-8, 1-7, 1-6, 1-5, 1-4, 1-3, or 1-2 nucleotides) at least partially complementary to the region contiguous (e.g., either at the 3′ end, the 5′ end, or both the 3′ and 5′ end) of the CIDEB mRNA transcript targeted by the select sense strand.

[0434] In some embodiments, the sense strand comprises from about 15-23 (e.g., 15-22, 15-21, 15-20, 15-19, 15-18, 15-17, 15-16, 16-22, 16-20, 16-19, 16-18, 16-17, 17-23, 17-22, 17-21, 17-20, 17-19, 17-18, 18-23, 18-22, 18-21, 18-20, 18-19, 19-23, 19-22, 19-21, 19-20, 20-23, 20-22, 20-21, 21-23, 21-22, 22-23) contiguous nucleotides differing by no more than 3 (e.g., 0, 1, 2, or 3) nucleotides from the nucleotide sequence of any one of the sense strands of any one of dsRNA agents 129, 135, 169, 170, 409, 479, 480, 481, or 482. In some embodiments, the sense strand comprises from about 19-23 (e.g., 19-22, 19-21, 19-20, 20-23, 20-22, 20-21, 21-23, 21-22, 22-23) contiguous nucleotides differing by no more than 3 (e.g., 0, 1, 2, or 3) nucleotides from the nucleotide sequence of any one of the sense strands of any one of dsRNA agents 129, 135, 169, 170, 409, 479, 480, 481, or 482. In some embodiments, the sense strand comprises from about 21-23 (e.g., 21-22, 22-23) contiguous nucleotides differing by no more than 3 (e.g., 0, 1, 2, or 3) nucleotides from the nucleotide sequence of any one of the sense strands of any one of dsRNA agents 129, 135, 169, 170, 409, 479, 480, 481, or 482.

[0435] In some embodiments, the nucleotide sequence of the sense strand comprises the nucleotide sequence of any one of the sense strands of any one of dsRNA agents 129, 135, 169, 170, 409, 479, 480, 481, or 482 differing by no more than 3 (e.g., 0, 1, 2, or 3) nucleotides from the sense strand. In some embodiments, the nucleotide sequence of the sense strand comprises the nucleotide sequence of any one of the sense strands of any one of dsRNA 129, 135, 169, 170, 409, 479, 480, 481, or 482.

[0436] As described above, Table 2 or Table 3 further identifies the target nucleic acid molecule within the reference CIDEB mRNA transcript at least partially identical to each of the sense strands. As such, disclosure further provides sense strands comprising at least 15 (e.g., 15, 16, 17, 18, 19, 20, 21, 22, 23, 24, 25, 26, 27, 28, 29, 30 (e.g., 19, 20, 21, 22, 23 (e.g., 23))) contiguous nucleotides differing by no more than 3 (e.g., 0, 1, 2, or 3) nucleotides from the nucleotide sequence of any one of the sense strands of any one of dsRNA agents 129, 135, 169, 170, 409, 479, 480, 481, or 482 and further comprising additional nucleotide sequences (e.g., comprising from about 1-10, 1-9, 1-8, 1-7, 1-6, 1-5, 1-4, 1-3, or 1-2 nucleotides) at least partially identical to the region contiguous (e.g., either at the 3′ end, the 5′ end, or both the 3′ and 5′ end) of the CIDEB mRNA transcript identical to the select sense strand.

[0437] In some embodiments, the sense strand comprises at least 15 (e.g., 16, 17, 18, 19, 20, 21) contiguous nucleotides differing by no more than 3 (e.g., 0, 1, 2, or 3) nucleotides from 50-90, 60-90, 68-106, 81-103, 138-190, 169-206, 232-254, 230-300, 280-312, 298-327, 444-498, 510-538, 521-558, 560-617, 692-778, 720-750, 740-780, 750-790, 760-780, 880-920, 890-940, 890-950, 920-970, 930-980, 961-1037, 1035-1060, 1105-1133, 1171-1213, 1216-1287, 1220-1270, 1294-1346, 1366-1400, 1370-1410, 1360-1400, 1470-1510, 1410-1460, 1520-1560, 1580-1620, 1640-1680, 1640-1690, 1670-1710, 1700-1740, 1700-1745, 1724-1753, 1750-1790, 1757-1812, 1770-1810, 1833-1864, 1880-1920, 1900-1940, 1900-1927, 1915-1966, 2010-2060, 2020-2060, 2030-2070, 2082-2110, 2080-2120, 2090-2130, 2130-2170, 2143-2198, 2197-2225, 2210-2250, 2215-2260, 2240-2280, 2250-2280, 2250-2290, or 2260-2290 of SEQ ID NO: 1. In some embodiments, the sense strand comprises at least 19 (e.g., 20, 21) contiguous nucleotides differing by no more than 3 (e.g., 0, 1, 2, or 3) nucleotides from nucleotides 50-90, 60-90, 68-106, 81-103, 138-190, 169-206, 232-254, 230-300, 280-312, 298-327, 444-498, 510-538, 521-558, 560-617, 692-778, 720-750, 740-780, 750-790, 760-780, 880-920, 890-940, 890-950, 920-970, 930-980, 961-1037, 1035-1060, 1105-1133, 1171-1213, 1216-1287, 1220-1270, 1294-1346, 1366-1400, 1370-1410, 1360-1400, 1470-1510, 1410-1460, 1520-1560, 1580-1620, 1640-1680, 1640-1690, 1670-1710, 1700-1740, 1700-1745, 1724-1753, 1750-1790, 1757-1812, 1770-1810, 1833-1864, 1880-1920, 1900-1940, 1900-1927, 1915-1966, 2010-2060, 2020-2060, 2030-2070, 2082-2110, 2080-2120, 2090-2130, 2130-2170, 2143-2198, 2197-2225, 2210-2250, 2215-2260, 2240-2280, 2250-2280, 2250-2290, or 2260-2290 of SEQ ID NO: 1. In some embodiments, the sense strand comprises at least 21 contiguous nucleotides differing by no more than 3 (e.g., 0, 1, 2, or 3) nucleotides from nucleotides 50-90, 60-90, 68-106, 81-103, 138-190, 169-206, 232-254, 230-300, 280-312, 298-327, 444-498, 510-538, 521-558, 560-617, 692-778, 720-750, 740-780, 750-790, 760-780, 880-920, 890-940, 890-950, 920-970, 930-980, 961-1037, 1035-1060, 1105-1133, 1171-1213, 1216-1287, 1220-1270, 1294-1346, 1366-1400, 1370-1410, 1360-1400, 1470-1510, 1410-1460, 1520-1560, 1580-1620, 1640-1680, 1640-1690, 1670-1710, 1700-1740, 1700-1745, 1724-1753, 1750-1790, 1757-1812, 1770-1810, 1833-1864, 1880-1920, 1900-1940, 1900-1927, 1915-1966, 2010-2060, 2020-2060, 2030-2070, 2082-2110, 2080-2120, 2090-2130, 2130-2170, 2143-2198, 2197-2225, 2210-2250, 2215-2260, 2240-2280, 2250-2280, 2250-2290, or 2260-2290 of SEQ ID NO: 1.

[0438] In some embodiments, the sense strand comprises from about 15-23 (e.g., 15-22, 15-21, 15-20, 15-19, 15-18, 15-17, 15-16, 16-22, 16-20, 16-19, 16-18, 16-17, 17-23, 17-22, 17-21, 17-20, 17-19, 17-18, 18-23, 18-22, 18-21, 18-20, 18-19, 19-23, 19-22, 19-21, 19-20, 20-23, 20-22, 20-21, 21-23, 21-22, 22-23) contiguous nucleotides differing by no more than 3 (e.g., 0, 1, 2, or 3) from nucleotides 50-90, 60-90, 68-106, 81-103, 138-190, 169-206, 232-254, 230-300, 280-312, 298-327, 444-498, 510-538, 521-558, 560-617, 692-778, 720-750, 740-780, 750-790, 760-780, 880-920, 890-940, 890-950, 920-970, 930-980, 961-1037, 1035-1060, 1105-1133, 1171-1213, 1216-1287, 1220-1270, 1294-1346, 1366-1400, 1370-1410, 1360-1400, 1470-1510, 1410-1460, 1520-1560, 1580-1620, 1640-1680, 1640-1690, 1670-1710, 1700-1740, 1700-1745, 1724-1753, 1750-1790, 1757-1812, 1770-1810, 1833-1864, 1880-1920, 1900-1940, 1900-1927, 1915-1966, 2010-2060, 2020-2060, 2030-2070, 2082-2110, 2080-2120, 2090-2130, 2130-2170, 2143-2198, 2197-2225, 2210-2250, 2215-2260, 2240-2280, 2250-2280, 2250-2290, or 2260-2290 of SEQ ID NO: 1. In some embodiments, the sense strand comprises from about 19-23 (e.g., 19-22, 19-21, 19-20, 20-23, 20-22, 20-21, 21-23, 21-22, 22-23) contiguous nucleotides differing by no more than 3 (e.g., 0, 1, 2, or 3) nucleotides from nucleotides 50-90, 60-90, 68-106, 81-103, 138-190, 169-206, 232-254, 230-300, 280-312, 298-327, 444-498, 510-538, 521-558, 560-617, 692-778, 720-750, 740-780, 750-790, 760-780, 880-920, 890-940, 890-950, 920-970, 930-980, 961-1037, 1035-1060, 1105-1133, 1171-1213, 1216-1287, 1220-1270, 1294-1346, 1366-1400, 1370-1410, 1360-1400, 1470-1510, 1410-1460, 1520-1560, 1580-1620, 1640-1680, 1640-1690, 1670-1710, 1700-1740,1700-1745, 1724-1753, 1750-1790, 1757-1812, 1770-1810, 1833-1864, 1880-1920, 1900-1940, 1900-1927, 1915-1966, 2010-2060, 2020-2060, 2030-2070, 2082-2110, 2080-2120, 2090-2130, 2130-2170, 2143-2198, 2197-2225, 2210-2250, 2215-2260, 2240-2280, 2250-2280, 2250-2290, or 2260-2290 of SEQ ID NO: 1. In some embodiments, the sense strand comprises from about 21-23 (e.g., 21-22, 22-23) contiguous nucleotides differing by no more than 3 (e.g., 0, 1, 2, or 3) nucleotides from nucleotides 50-90, 60-90, 68-106, 81-103, 138-190, 169-206, 232-254, 230-300, 280-312, 298-327, 444-498, 510-538, 521-558, 560-617, 692-778, 720-750, 740-780, 750-790, 760-780, 880-920, 890-940, 890-950, 920-970, 930-980, 961-1037, 1035-1060, 1105-1133, 1171-1213, 1216-1287, 1220-1270, 1294-1346, 1366-1400, 1370-1410, 1360-1400, 1470-1510, 1410-1460, 1520-1560, 1580-1620, 1640-1680, 1640-1690, 1670-1710, 1700-1740, 1700-1745, 1724-1753, 1750-1790, 1757-1812, 1770-1810, 1833-1864, 1880-1920, 1900-1940, 1900-1927, 1915-1966, 2010-2060, 2020-2060, 2030-2070, 2082-2110, 2080-2120, 2090-2130, 2130-2170, 2143-2198, 2197-2225, 2210-2250, 2215-2260, 2240-2280, 2250-2280, 2250-2290, or 2260-2290 of SEQ ID NO: 1.

[0439] As described above, Table 2 or Table 3 further identifies the target nucleic acid molecule within the reference CIDEB mRNA transcript at least partially identical to each of the sense strands. As such, the disclosure further provides sense strands comprising at least 15 (e.g., 15, 16, 17, 18, 19, 20, 21, 22, 23, 24, 25, 26, 27, 28, 29, 30 (e.g., 19, 20, 21, 22, 23 (e.g., 23))) contiguous nucleotides differing by no more than 3 (e.g., 0, 1, 2, or 3) nucleotides from nucleotides 50-90, 60-90, 68-106, 81-103, 138-190, 169-206, 232-254, 230-300, 280-312, 298-327, 444-498, 510-538, 521-558, 560-617, 692-778, 720-750, 740-780, 750-790, 760-780, 880-920, 890-940, 890-950, 920-970, 930-980, 961-1037, 1035-1060, 1105-1133, 1171-1213, 1216-1287, 1220-1270, 1294-1346, 1366-1400, 1370-1410, 1360-1400, 1470-1510, 1410-1460, 1520-1560, 1580-1620, 1640-1680, 1640-1690, 1670-1710, 1700-1740, 1700-1745, 1724-1753, 1750-1790, 1757-1812, 1770-1810, 1833-1864, 1880-1920, 1900-1940, 1900-1927, 1915-1966, 2010-2060, 2020-2060, 2030-2070, 2082-2110, 2080-2120, 2090-2130, 2130-2170, 2143-2198, 2197-2225, 2210-2250, 2215-2260, 2240-2280, 2250-2280, 2250-2290, or 2260-2290 of SEQ ID NO: 1 and further comprising additional nucleotide sequences (e.g., comprising from about 1-10, 1-9, 1-8, 1-7, 1-6, 1-5, 1-4, 1-3, or 1-2 nucleotides) at least partially identical to the region contiguous (e.g., either at the 3′ end, the 5′ end, or both the 3′ and 5′ end) of the CIDEB mRNA transcript identical to the select sense strand.

[0440] In some embodiments, the sense strand comprises at least 15 (e.g., 16, 17, 18, 19, 20, 21) contiguous nucleotides differing by no more than 3 (e.g., 0, 1, 2, or 3) nucleotides from 1225-1285, 1235-1275, 1240-1270, 1245-1265, 1227-1287, 1237-1277, 1242-1272, 1247-1267, 1231-1291, 1241-1261, 1246-1276, 1251-1271, 1235-1295, 1245-1265, 1250-1280, 1255-1275, 1353-1411, 1363-1381, 1368-1396, 1373-1391, 1762-1820, 1772-1810, 1757-1805, 1782-1800, 1912-1972, 1922-1942, 1927-1957, 1932-1952, 1922-1982, 1932-1972, 1937-1967, 1942-1962, 1923-1983, 1933-1973, 1938-1968, or 1943-1963 of SEQ ID NO: 1. In some embodiments, the sense strand comprises at least 19 (e.g., 20, 21) contiguous nucleotides differing by no more than 3 (e.g., 0, 1, 2, or 3) nucleotides from nucleotides 1225-1285, 1235-1275, 1240-1270, 1245-1265, 1227-1287, 1237-1277, 1242-1272, 1247-1267, 1231-1291, 1241-1261, 1246-1276, 1251-1271, 1235-1295, 1245-1265, 1250-1280, 1255-1275, 1353-1411, 1363-1381, 1368-1396, 1373-1391, 1762-1820, 1772-1810, 1757-1805, 1782-1800, 1912-1972, 1922-1942, 1927-1957, 1932-1952, 1922-1982, 1932-1972, 1937-1967, 1942-1962, 1923-1983, 1933-1973, 1938-1968, or 1943-1963 of SEQ ID NO: 1. In some embodiments, the sense strand comprises at least 21 contiguous nucleotides differing by no more than 3 (e.g., 0, 1, 2, or 3) nucleotides from nucleotides 1225-1285, 1235-1275, 1240-1270, 1245-1265, 1227-1287, 1237-1277, 1242-1272, 1247-1267, 1231-1291, 1241-1261, 1246-1276, 1251-1271, 1235-1295, 1245-1265, 1250-1280, 1255-1275, 1353-1411, 1363-1381, 1368-1396, 1373-1391, 1762-1820, 1772-1810, 1757-1805, 1782-1800, 1912-1972, 1922-1942, 1927-1957, 1932-1952, 1922-1982, 1932-1972, 1937-1967, 1942-1962, 1923-1983, 1933-1973, 1938-1968, or 1943-1963 of SEQ ID NO: 1.

[0441] In some embodiments, the sense strand comprises from about 15-23 (e.g., 15-22, 15-21, 15-20, 15-19, 15-18, 15-17, 15-16, 16-22, 16-20, 16-19, 16-18, 16-17, 17-23, 17-22, 17-21, 17-20, 17-19, 17-18, 18-23, 18-22, 18-21, 18-20, 18-19, 19-23, 19-22, 19-21, 19-20, 20-23, 20-22, 20-21, 21-23, 21-22, 22-23) contiguous nucleotides differing by no more than 3 (e.g., 0, 1, 2, or 3) from nucleotides 1225-1285, 1235-1275, 1240-1270, 1245-1265, 1227-1287, 1237-1277, 1242-1272, 1247-1267, 1231-1291, 1241-1261, 1246-1276, 1251-1271, 1235-1295, 1245-1265, 1250-1280, 1255-1275, 1353-1411, 1363-1381, 1368-1396, 1373-1391, 1762-1820, 1772-1810, 1757-1805, 1782-1800, 1912-1972, 1922-1942, 1927-1957, 1932-1952, 1922-1982, 1932-1972, 1937-1967, 1942-1962, 1923-1983, 1933-1973, 1938-1968, or 1943-1963 of SEQ ID NO: 1. In some embodiments, the sense strand comprises from about 19-23 (e.g., 19-22, 19-21, 19-20, 20-23, 20-22, 20-21, 21-23, 21-22, 22-23) contiguous nucleotides differing by no more than 3 (e.g., 0, 1, 2, or 3) nucleotides from nucleotides 1225-1285, 1235-1275, 1240-1270, 1245-1265, 1227-1287, 1237-1277, 1242-1272, 1247-1267, 1231-1291, 1241-1261, 1246-1276, 1251-1271, 1235-1295, 1245-1265, 1250-1280, 1255-1275, 1353-1411, 1363-1381, 1368-1396, 1373-1391, 1762-1820, 1772-1810, 1757-1805, 1782-1800, 1912-1972, 1922-1942, 1927-1957, 1932-1952, 1922-1982, 1932-1972, 1937-1967, 1942-1962, 1923-1983, 1933-1973, 1938-1968, or 1943-1963 of SEQ ID NO: 1. In some embodiments, the sense strand comprises from about 21-23 (e.g., 21-22, 22-23) contiguous nucleotides differing by no more than 3 (e.g., 0, 1, 2, or 3) nucleotides from nucleotides 1225-1285, 1235-1275, 1240-1270, 1245-1265, 1227-1287, 1237-1277, 1242-1272, 1247-1267, 1231-1291, 1241-1261, 1246-1276, 1251-1271, 1235-1295, 1245-1265, 1250-1280, 1255-1275, 1353-1411, 1363-1381, 1368-1396, 1373-1391, 1762-1820, 1772-1810, 1757-1805, 1782-1800, 1912-1972, 1922-1942, 1927-1957, 1932-1952, 1922-1982, 1932-1972, 1937-1967, 1942-1962, 1923-1983, 1933-1973, 1938-1968, or 1943-1963 of SEQ ID NO: 1.

[0442] As described above, Table 2 or Table 3 further identifies the target nucleic acid molecule within the reference CIDEB mRNA transcript at least partially identical to each of the sense strands. As such, the disclosure further provides sense strands comprising at least 15 (e.g., 15, 16, 17, 18, 19, 20, 21, 22, 23, 24, 25, 26, 27, 28, 29, 30 (e.g., 19, 20, 21, 22, 23 (e.g., 23))) contiguous nucleotides differing by no more than 3 (e.g., 0, 1, 2, or 3) nucleotides from nucleotides 1225-1285, 1235-1275, 1240-1270, 1245-1265, 1227-1287, 1237-1277, 1242-1272, 1247-1267, 1231-1291, 1241-1261, 1246-1276, 1251-1271, 1235-1295, 1245-1265, 1250-1280, 1255-1275, 1353-1411, 1363-1381, 1368-1396, 1373-1391, 1762-1820, 1772-1810, 1757-1805, 1782-1800, 1912-1972, 1922-1942, 1927-1957, 1932-1952, 1922-1982, 1932-1972, 1937-1967, 1942-1962, 1923-1983, 1933-1973, 1938-1968, or 1943-1963 of SEQ ID NO: 1 and further comprising additional nucleotide sequences (e.g., comprising from about 1-10, 1-9, 1-8, 1-7, 1-6, 1-5, 1-4, 1-3, or 1-2 nucleotides) at least partially identical to the region contiguous (e.g., either at the 3′ end, the 5′ end, or both the 3′ and 5′ end) of the CIDEB mRNA transcript identical to the select sense strand.

[0443] It is to be understood, that although the sense strands are not described as being modified (e.g., comprising chemically modified nucleotides), conjugated, etc., the disclosure includes any sense strand that is unmodified, unconjugated, modified (e.g., as described herein), or conjugated (e.g., as described herein).

4.2.3 dsRNA Agents

[0444] In some embodiments, the agent (e.g., RNAi agent) comprises a dsRNA agent comprising an antisense strand (e.g., described herein, e.g., described in § 4.2.1) and a sense strand (e.g., described herein, e.g., described in § 4.2.2) that hybridize to form a double stranded region (e.g., under conditions in which the dsRNA will be used (e.g., under physiological (e.g., mammalian, e.g., human) conditions within a cell)).

[0445] As described above, antisense strands (e.g., described herein) comprise a region of complementarity that comprises a nucleotide sequence that is at least partially (e.g., substantially, fully) complementary to the nucleotide sequence of a target nucleic acid molecule (e.g., a target mRNA (e.g., a CIDEB mRNA), a portion of a target mRNA (e.g., a CIDEB mRNA)); and the sense strands comprise a region of complementarity that comprises a nucleotide sequence that is at least partially (e.g., substantially, fully) complementary to the nucleotide sequence of at least a portion of an antisense strand.

### 4.2.3.1 Single & Multiple Nucleic Acid Molecules

[0446] As described herein, and known in the art, the sense strand and the antisense strand can be part of a single larger nucleic acid molecule (connected as a single stranded nucleic acid molecule) or separate nucleic acid molecules (only connected through the double stranded region). In some embodiments, the sense strand and the antisense strand are separate nucleic acid molecules. In some embodiments, sense strand and the antisense strand are part of a single larger nucleic acid molecule.

[0447] In embodiments wherein the sense and antisense strands are part of a single nucleic acid molecule, the nucleic acid molecule may comprise a hairpin loop between the antisense strand and the sense strand to allow for formation of the double stranded region. In some embodiments, the hairpin loop comprises at least 1 (e.g., at least 2, 3, 4, 5, 6, 7, 8, 9, 10, 20, 23, 25 or more) unpaired nucleotides (non-complementary nucleotide mismatches). In some embodiments, the hairpin loop comprises at least one but less than 25, 23, 20, 10, 9, 8, 7, 6, 5, 4, 3, or 2 unpaired nucleotides (non-complementary nucleotide mismatches). In some embodiments, the hairpin loop comprises about 25, 23, 20, 9, 8, 7, 6, 5, 4, 3, or 1 unpaired nucleotide (non-complementary nucleotide mismatch).

[0448] Without wishing to be bound by theory, in embodiments wherein the sense strand and the antisense strand are part of a single nucleic acid molecule, after introduction into a suitable cell (e.g., a mammalian cell, e.g., a human cell), the nucleic acid molecule may be cleaved into a dsRNA molecule wherein the two strands of the dsRNA molecule are no longer part of the same nucleic acid molecule e.g., by a Type III endonuclease (e.g., Dicer) (see, e.g., Sharp et al. (2001) Genes Dev. 15:485, the entire contents of which are incorporated by herein by reference for all purposes).

### 4.2.3.2 Length of Double Stranded Region

[0449] In some embodiments, the double stranded region is about 15-30 base pairs in length (e.g., 15-29, 15-28, 15-27, 15-26, 15-25, 15-24, 15-23, 15-22, 15-21, 15-20, 15-19, 15-18, 15-17, 18-30, 18-29, 18-28, 18-27, 18-26, 18-25, 18-24, 18-23, 18-22, 18-21, 18-20, 19-30, 19-29, 19-28, 19-27, 19-26, 19-25, 19-24, 19-23, 19-22, 19-21, 19-20, 20-30, 20-29, 20-28, 20-27, 20-26, 20-25, 20-24, 20-23, 20-22, 20-21, 21-30, 21-29, 21-28, 21-27, 21-26, 21-25, 21-24, 21-23, or 21-22 base pairs in length). In some embodiments, the double stranded region is about 18-25 base pairs in length (e.g., 18-25, 18-24, 18-23, 18-22, 18-21, 18-20, 19-25, 19-24, 19-23, 19-22, 19-21, 19-20, 20-25, 20-24, 20-23, 20-22, 20-21, 21-25, 21-24, 21-23, 21-22, 22-25, 22-24, 22-23, 23-25, 23-24 or 24-25 base pairs in length (e.g., 19-21 base pairs in length)). In some embodiments, the double stranded region is about 15-30, 15-29, 15-28, 15-27, 15-26, 15-25, 15-24, 15-23, 15-22, 15-21, 15-20, 15-19, 15-18, 15-17, 15-16, 19-30, 19-29, 19-28, 19-27, 19-26, 19-25, 19-24, 19-23, 19-22, 19-20, 19-21, 23-30, 23-29, 23-28, 23-27, 23-26, 23-25, 23-24, 21-30, 21-29, 21-28, 21-27, 21-26, 21-25, 21-24, 21-23, or 21-22 base pairs in length. In some embodiments, the double stranded region is about 19-21 (e.g., 19-20) base pairs in length.

[0450] In some embodiments, the double stranded region is not more than about 15, 16, 17, 18, 19, 20, 21, 22, 23, 24, 25, 26, 27, 28, 29, or 30 base pairs in length. In some embodiments, the double stranded region is about 15, 16, 17, 18, 19, 20, 21, 22, 23, 24, 25, 26, 27, 28, 29, or 30 base pairs in length. In some embodiments, the double stranded region is about 19, 20, or 21 base pairs in length. In some embodiments, the double stranded region is about 19 base pairs in length. In some embodiments, the double stranded region is about 20 base pairs in length. In some embodiments, the double stranded region is about 21 base pairs in length. In some embodiments, the double stranded region is about 23 base pairs in length. Ranges and lengths intermediate to the above recited ranges and lengths are also contemplated to be part of the disclosure.

### 4.2.3.3 Nucleotide Overhangs & Blunt Ends

[0451] In some embodiments, the dsRNA agent comprises one or more (e.g., 1 or 2) nucleotide overhang. As is clear from the disclosure, but for the sake of clarity, the nucleotides of a nucleotide overhang can include one or more a modified (e.g., chemically modified) nucleotide (e.g., described herein, e.g., described in §§ 4.3, 4.3.1).

[0452] In some embodiments, the nucleotide overhang comprises from about 1-5 nucleotides, e.g., 1-4, 1-3, 1-2, 2-5, 2-4, 2-3, 3-5, 3-4, 4-5 nucleotides. In some embodiments, the nucleotide overhang comprises or consists of about 1, 2, 3, 4, or 5 nucleotides. In some embodiments, the nucleotide overhang comprises or consists of about 1 nucleotide. In some embodiments, the nucleotide overhang comprises or consists of about 2 nucleotides.

[0453] The nucleotide overhang(s) can be on the sense strand, the antisense strand, or both the sense strand and the antisense strand. In some embodiments, the sense strand comprises a nucleotide overhang. In some embodiments, the antisense strand comprises a nucleotide overhang. In some embodiments, the sense strand and the antisense strand both comprise a nucleotide overhang.

[0454] Furthermore, the nucleotide(s) of an overhang can be present on the 5′-end, 3′-end, or both the 5′-end, 3′-end of an antisense or sense strand. In some embodiments, the sense strand comprises a nucleotide overhang at the 5′-end. In some embodiments, the sense strand comprises a nucleotide overhang at the 3′-end. In some embodiments, the sense strand comprises a nucleotide overhang at the 5′-end and the 3′-end. In some embodiments, the antisense strand comprises a nucleotide overhang at the 5′-end. In some embodiments, the antisense strand comprises a nucleotide overhang at the 3′-end. In some embodiments, the antisense strand comprises a nucleotide overhang at the 5′-end and the 3′-end. In some embodiments, the antisense strand comprises a nucleotide overhang at the 3′-end; and the sense strand comprises a nucleotide overhang at the 3′-end. In some embodiments, the antisense strand comprises a nucleotide overhang at the 5′-end; and the sense strand comprises a nucleotide overhang at the 5′-end.

[0455] In some embodiments, the dsRNA agent comprises one or more blunt end. In some embodiments, the dsRNA agent comprises a blunt end at the end of the agent comprising the 3′ end of the sense strand and the 5′ end of the antisense strand. In some embodiments, the dsRNA agent comprises a blunt end at the end of the agent comprising the 5′ end of the sense strand and the 3′ end of the antisense strand. In some embodiments, both ends of the dsRNA agent are blunt ends.

### 4.2.3.4 Exemplary Structural Combinations of Sense & Antisense Strands

[0456] In some embodiments, the antisense strand and the sense strand contain the same number of nucleotides. In some embodiments, the antisense strand and the sense strand contain different numbers of nucleotides. In some embodiments, the nucleotide sequence of the sense strand is from about 1-5, 1-3, or 1-2 nucleotides shorter than the nucleotide sequence of the antisense strand. In some embodiments, the nucleotide sequence of the sense strand is about 1, 2, 3, 4, or 5 nucleotides shorter than the nucleotide sequence of the antisense strand. In some embodiments, the nucleotide sequence of the sense strand is about 2 nucleotides shorter than the nucleotide sequence of the antisense strand. In some embodiments, the nucleotide sequence of the antisense strand is from about 1-5, 1-3, or 1-2 nucleotides shorter than the nucleotide sequence of the sense strand. In some embodiments, the nucleotide sequence of the antisense strand is about 1, 2, 3, 4, or 5 nucleotides shorter than the nucleotide sequence of the sense strand. In some embodiments, the nucleotide sequence of the antisense strand is about 2 nucleotides shorter than the nucleotide sequence of the sense strand.

[0457] In some embodiments, the sense strand comprises or consists of 21 nucleotides. In some embodiments, the antisense strand comprises or consists of 23 nucleotides. In some embodiments, the sense strand comprises or consists of 21 nucleotides; and the antisense strand comprises or consists of 23 nucleotides. In some embodiments, the double stranded region comprises or consists of 21 nucleotides. In some embodiments, the antisense strand comprises a 2-nucleotide overhang at the 3′ end. In some embodiments, the 5′ end of the antisense strand and 3′ end of the sense strand form a blunt end. In some embodiments, the sense strand comprises or consists of 21 nucleotides; the antisense strand comprises or consists of 23 nucleotides; the double stranded region comprises or consists of 21 nucleotides; the antisense strand comprises a 2-nucleotide overhang at the 3′ end; and the 5′ end of the antisense strand and 3′ end of the sense strand form a blunt end.

[0458] In some embodiments, the sense strand comprises or consists of 19 nucleotides. In some embodiments, the antisense strand comprises or consists of 21 nucleotides. In some embodiments, the sense strand comprises or consists of 19 nucleotides; and the antisense strand comprises or consists of 21 nucleotides. In some embodiments, the double stranded region comprises or consists of 19 nucleotides. In some embodiments, the antisense strand comprises a 2-nucleotide overhang at the 3′ end. In some embodiments, the 5′ end of the antisense strand and 3′ end of the sense strand form a blunt end. In some embodiments, the sense strand comprises or consists of 19 nucleotides; the antisense strand comprises or consists of 21 nucleotides; the double stranded region comprises or consists of 19 nucleotides; the antisense strand comprises a 2-nucleotide overhang at the 3′ end; and the 5′ end of the antisense strand and 3′ end of the sense strand form a blunt end.

[0459] In some embodiments, the sense strand comprises or consists of 21 nucleotides. In some embodiments, the antisense strand comprises or consists of 21 nucleotides. In some embodiments, the sense strand comprises or consists of 21 nucleotides; and the antisense strand comprises or consists of 21 nucleotides. In some embodiments, the double stranded region comprises or consists of 19 nucleotides. In some embodiments, the antisense strand comprises a 2-nucleotide overhang at the 3′ end. In some embodiments, the sense strand comprises a 2-nucleotide overhang at the 3′ end. In some embodiments, the sense strand comprises or consists of 21 nucleotides; the antisense strand comprises or consists of 21 nucleotides; the double stranded region comprises or consists of 19 nucleotides; the antisense strand comprises a 2-nucleotide overhang at the 3′ end; and the sense strand comprises a 2-nucleotide overhang at the 3′ end.

[0460] In some embodiments, the sense strand comprises or consists of 20 nucleotides. In some embodiments, the antisense strand comprises or consists of 19 nucleotides. In some embodiments, the sense strand comprises or consists of 20 nucleotides; and the antisense strand comprises or consists of 19 nucleotides. In some embodiments, the double stranded region comprises or consists of 20 nucleotides. In some embodiments, the sense strand comprises a 1-nucleotide overhang at the 5′ end. In some embodiments, the 5′ end of the antisense strand and 3′ end of the sense strand form a blunt end. In some embodiments, the sense strand comprises or consists of 20 nucleotides; the antisense strand comprises or consists of 19 nucleotides; the double stranded region comprises or consists of 20 nucleotides; the sense strand comprises a 1-nucleotide overhang at the 5′ end; and the 5′ end of the antisense strand and 3′ end of the sense strand form a blunt end.

[0461] In some embodiments, the sense strand comprises or consists of 21 nucleotides. In some embodiments, the antisense strand comprises or consists of 19 nucleotides. In some embodiments, the sense strand comprises or consists of 21 nucleotides; and the antisense strand comprises or consists of 19 nucleotides. In some embodiments, the double stranded region comprises or consists of 19 nucleotides. In some embodiments, the sense strand comprises a 1-nucleotide overhang at the 3′ end. In some embodiments, the sense strand comprises a 1-nucleotide overhang at the 5′ end. In some embodiments, the sense strand comprises or consists of 21 nucleotides; the antisense strand comprises or consists of 19 nucleotides; the double stranded region comprises or consists of 19 nucleotides; the sense strand comprises a 1-nucleotide overhang at the 3′ end; and the sense strand comprises a 1-nucleotide overhang at the 5′ end.

[0462] In some embodiments, the sense strand comprises or consists of 24 nucleotides. In some embodiments, the antisense strand comprises or consists of 23 nucleotides. In some embodiments, the sense strand comprises or consists of 24 nucleotides; and the antisense strand comprises or consists of 23 nucleotides. In some embodiments, the double stranded region comprises or consists of 21 nucleotides. In some embodiments, the antisense strand comprises a 2-nucleotide overhang at the 3′ end. In some embodiments, the sense strand comprises a 3-nucleotide overhang at the 3′ end. In some embodiments, the sense strand comprises or consists of 24 nucleotides; the antisense strand comprises or consists of 23 nucleotides; the double stranded region comprises or consists of 21 nucleotides; the antisense strand comprises a 2-nucleotide overhang at the 3′ end; and the sense strand comprises a 3-nucleotide overhang at the 3′ end.

[0463] In some embodiments, the sense strand comprises or consists of 19 nucleotides. In some embodiments, the antisense strand comprises or consists of 19 nucleotides. In some embodiments, the sense strand comprises or consists of 19 nucleotides; and the antisense strand comprises or consists of 19 nucleotides. In some embodiments, the double stranded region comprises or consists of 19 nucleotides. In some embodiments, the 5′ end of the antisense strand (and 3′ end of the sense strand) form a blunt end. In some embodiments, the 3′ end of the antisense strand (and 5′ end of the sense strand) form a blunt end. In some embodiments, the sense strand comprises or consists of 19 nucleotides; the antisense strand comprises or consists of 19 nucleotides; the double stranded region comprises or consists of 19 nucleotides; the 5′ end of the antisense strand (and 3′ end of the sense strand) form a blunt end; and the 3′ end of the antisense strand (and 5′ end of the sense strand) form a blunt end

[0464] In some embodiments, the antisense strand and the sense strand are part of the same larger nucleic acid molecule, wherein the nucleic acid molecule comprises or consists of 44 nucleotides, the antisense portion comprises or consists of 21 nucleotides, the sense strand portion of the nucleic acid molecule comprises 19 nucleotides, the double stranded region comprises or consists of 19 nucleotides, the antisense strand comprises a 2-nucleotide overhang at the 3′ end, and the intervening nucleotide sequence between the antisense strand and the sense strand comprises or consists of 4 unpaired nucleotides that create a hairpin loop.

### 4.2.3.5 Exemplary Antisense Strands & Sense Strands

[0465] In some embodiments, the antisense strand is an antisense strand described herein. In some embodiments, the sense strand is a sense strand described herein. In some embodiments, the antisense strand is an antisense strand described in § 4.2.1. In some embodiments, the sense strand is a sense strand described in § 4.2.2. In some embodiments, the antisense strand is an antisense strand described in § 4.2.1; and the sense strand is a sense strand described in § 4.2.2. It is to be understood that any sense strand described herein (e.g., in § 4.2.2); and be utilized in combination with any antisense strand in a dsRNA agent described herein (e.g., in § 4.2.1). For the sake of clarity, the entire contents of in §§ 4.2.1 and § 4.2.2, are incorporated by reference into the instant section in § 4.2.3.5.

[0466] In some embodiments, the nucleotide sequence of the sense strand differs by no more than 5 (e.g., 0, 1, 2, 3, 4, or 5) nucleotides from the nucleotide sequence of any one of the sense strands set forth in Table 2 or Table 3; and the nucleotide sequence of the antisense strand differs by no more than 5 (e.g., 0, 1, 2, 3, 4, or 5) nucleotides from the nucleotide sequence of any one of the antisense strands set forth in Table 2 or Table 3. In some embodiments, the nucleotide sequence of the sense strand differs by no more than 3 (e.g., 0, 1, 2, or 3) nucleotides from the nucleotide sequence of any one of the sense strands set forth in Table 2 or Table 3; and the nucleotide sequence of the antisense strand differs by no more than 3 (e.g., 0, 1, 2, or 3) nucleotides from the nucleotide sequence of any one of the antisense strands set forth in Table 2 or Table 3. In some embodiments, the nucleotide sequence of the sense strand differs by no more than 2 (e.g., 0, 1, or 2) nucleotides from the nucleotide sequence of any one of the sense strands set forth in Table 2 or Table 3; and the nucleotide sequence of the antisense strand differs by no more than 2 (e.g., 0, 1, or 2) nucleotides from the nucleotide sequence of any one of the antisense strands set forth in Table 2 or Table 3. In some embodiments, the nucleotide sequence of the sense strand differs by no more than 1 (e.g., 0 or 1) nucleotide from the nucleotide sequence of any one of the sense strands set forth in Table 2 or Table 3; and the nucleotide sequence of the antisense strand differs by no more than 1 (e.g., 0 or 1) nucleotide from the nucleotide sequence of any one of the antisense strands set forth in Table 2 or Table 3.

[0467] In some embodiments, the nucleotide sequence of the sense strand comprises the nucleotide sequence of any one of the sense strands set forth in Table 2 or Table 3 differing by no more than 5 (e.g., 0, 1, 2, 3, 4, or 5) nucleotides from the sense strand set forth in Table 2 or Table 3; and the nucleotide sequence of the antisense strand comprises the nucleotide sequence of any one of the antisense strands set forth in Table 2 or Table 3 differing by no more than 5 (e.g., 0, 1, 2, 3, 4, or 5) nucleotides from the antisense strand set forth in Table 2 or Table 3. In some embodiments, the nucleotide sequence of the sense strand comprises the nucleotide sequence of any one of the sense strands set forth in Table 2 or Table 3 differing by no more than 3 (e.g., 0, 1, 2, or 3) nucleotides from the sense strand set forth in Table 2 or Table 3; and the nucleotide sequence of the antisense strand comprises the nucleotide sequence of any one of the antisense strands set forth in Table 2 or Table 3 differing by no more than 3 (e.g., 0, 1, 2, or 3) nucleotides from the antisense strand set forth in Table 2 or Table 3. In some embodiments, the nucleotide sequence of the sense strand comprises the nucleotide sequence of any one of the sense strands set forth in Table 2 or Table 3 differing by no more than 2 (e.g., 0, 1, or 2) nucleotides from the sense strand set forth in Table 2 or Table 3; and the nucleotide sequence of the antisense strand comprises the nucleotide sequence of any one of the antisense strands set forth in Table 2 or Table 3 differing by no more than 2 (e.g., 0, 1, or 2) nucleotides from the antisense strand set forth in Table 2 or Table 3. In some embodiments, the nucleotide sequence of the sense strand comprises the nucleotide sequence of any one of the sense strands set forth in Table 2 or Table 3 differing by no more than 1 (e.g., 0 or 1) nucleotide from the sense strand set forth in Table 2 or Table 3; and the nucleotide sequence of the antisense strand comprises the nucleotide sequence of any one of the antisense strands set forth in Table 2 or Table 3 differing by no more than 1 (e.g., 0 or 1) nucleotide from the antisense strand set forth in Table 2 or Table 3.

[0468] In some embodiments, the nucleotide sequence of the sense strand is at least 85%, 86%, 87%, 88%, 89%, 90%, 91%, 92%, 93%, 94%, 95%, 96%, 97%, 98%, 99% or 100% identical to the nucleotide sequence of any one of the sense strands set forth in Table 2 or Table 3; and the nucleotide sequence of the antisense strand is at least 85%, 86%, 87%, 88%, 89%, 90%, 91%, 92%, 93%, 94%, 95%, 96%, 97%, 98%, 99% or 100% identical to the nucleotide sequence of any one of the antisense strands set forth in Table 2 or Table 3. In some embodiments, the nucleotide sequence of the sense strand is at least 90%, 91%, 92%, 93%, 94%, 95%, 96%, 97%, 98%, 99% or 100% identical to the nucleotide sequence of any one of the sense strands set forth in Table 2 or Table 3; and the nucleotide sequence of the antisense strand is at least 90%, 91%, 92%, 93%, 94%, 95%, 96%, 97%, 98%, 99% or 100% identical to the nucleotide sequence of any one of the antisense strands set forth in Table 2 or Table 3. In some embodiments, the nucleotide sequence of the sense strand is at least 95%, 96%, 97%, 98%, 99% or 100% identical to the nucleotide sequence of any one of the sense strands set forth in Table 2 or Table 3; and the nucleotide sequence of the antisense strand is at least 95%, 96%, 97%, 98%, 99% or 100% identical to the nucleotide sequence of any one of the antisense strands set forth in Table 2 or Table 3. In some embodiments, the nucleotide sequence of the sense strand is at least 96%, 97%, 98%, 99% or 100% identical to the nucleotide sequence of any one of the sense strands set forth in Table 2 or Table 3; and the nucleotide sequence of the antisense strand is at least 96%, 97%, 98%, 99% or 100% identical to the nucleotide sequence of any one of the antisense strands set forth in Table 2 or Table 3. In some embodiments, the nucleotide sequence of the sense strand is at least 97%, identical to the nucleotide sequence of any one of the sense strands set forth in Table 2 or Table 3; and the nucleotide sequence of the antisense strand is at least 97%, identical to the nucleotide sequence of any one of the antisense strands set forth in Table 2 or Table 3. In some embodiments, the nucleotide sequence of the sense strand is at least 98% identical to the nucleotide sequence of any one of the sense strands set forth in Table 2 or Table 3; and the nucleotide sequence of the antisense strand is at least 98% identical to the nucleotide sequence of any one of the antisense strands set forth in Table 2 or Table 3. In some embodiments, the nucleotide sequence of the sense strand is at least 99% identical to the nucleotide sequence of any one of the sense strands set forth in Table 2 or Table 3; and the nucleotide sequence of the antisense strand is at least 99% identical to the nucleotide sequence of any one of the antisense strands set forth in Table 2 or Table 3. In some embodiments, the nucleotide sequence of the sense strand is 100% identical to the nucleotide sequence of any one of the sense strands set forth in Table 2 or Table 3; and the nucleotide sequence of the antisense strand is 100% identical to the nucleotide sequence of any one of the antisense strands set forth in Table 2 or Table 3.

[0469] In some embodiments, the nucleotide sequence of the sense strand comprises the nucleotide sequence of any one of the sense strands set forth in Table 2 or Table 3; and the nucleotide sequence of the antisense strand comprises the nucleotide sequence of any one of the antisense strands set forth in Table 2 or Table 3. In some embodiments, the nucleotide sequence of the sense strand consists of the nucleotide sequence of any one of the sense strands set forth in Table 2 or Table 3; and the nucleotide sequence of the antisense strand consists of the nucleotide sequence of any one of the antisense strands set forth in Table 2 or Table 3.

[0470] In some embodiments, the antisense strand comprises at least 15 (e.g., 15, 16, 17, 18, 19, 20, 21, 22, 23, 24, 25, 26, 27, 28, 29, 30 (e.g., 19, 20, 21, 22, 23 (e.g., 23))) contiguous nucleotides differing by no more than 3 (e.g., 0, 1, 2, or 3) nucleotides from the nucleotide sequence of any one of the antisense strands set forth in Table 2 or Table 3; and the sense strand comprises at least 15 (e.g., 15, 16, 17, 18, 19, 20, 21, 22, 23, 24, 25, 26, 27, 28, 29, 30 (e.g., 19, 20, 21, 22, 23 (e.g., 21))) contiguous nucleotides differing by no more than 3 (e.g., 0, 1, 2, or 3) nucleotides from the nucleotide sequence of any one of the sense strands set forth in Table 2 or Table 3. In some embodiments, the antisense strand comprises at least 19 (e.g., 20, 21, 22, 23, 24, 25, 26, 27, 28, 29, 30 (e.g., 19, 20, 21, 22, 23 (e.g., 23))) contiguous nucleotides differing by no more than 3 (e.g., 0, 1, 2, or 3) nucleotides from the nucleotide sequence of any one of the antisense strands set forth in Table 2 or Table 3; and the sense strand comprises at least 19 (e.g., 20, 21, 22, 23, 24, 25, 26, 27, 28, 29, 30 (e.g., 19, 20, 21, 22, 23 (e.g., 21))) contiguous nucleotides differing by no more than 3 (e.g., 0, 1, 2, or 3) nucleotides from the nucleotide sequence of any one of the sense strands set forth in Table 2 or Table 3. In some embodiments, the antisense strand comprises at least 21 (e.g., 22, 23, 24, 25, 26, 27, 28, 29, 30 (e.g., 21, 22, 23 (e.g., 23))) contiguous nucleotides differing by no more than 3 (e.g., 0, 1, 2, or 3) nucleotides from the nucleotide sequence of any one of the antisense strands set forth in Table 2 or Table 3; and the sense strand comprises at least 19 (e.g., 20, 21, 22, 23, 24, 25, 26, 27, 28, 29, 30 (e.g., 19, 20, 21, 22, 23 (e.g., 21))) contiguous nucleotides differing by no more than 3 (e.g., 0, 1, 2, or 3) nucleotides from the nucleotide sequence of any one of the sense strands set forth in Table 2 or Table 3. In some embodiments, the antisense strand comprises at least 21 (e.g., 22, 23, 24, 25, 26, 27, 28, 29, 30 (e.g., 21, 22, 23 (e.g., 23))) contiguous nucleotides differing by no more than 3 (e.g., 0, 1, 2, or 3) nucleotides from the nucleotide sequence of any one of the antisense strands set forth in Table 2 or Table 3; and the sense strand comprises at least 21 (e.g., 22, 23, 24, 25, 26, 27, 28, 29, 30 (e.g., 21, 22, 23 (e.g., 21))) contiguous nucleotides differing by no more than 3 (e.g., 0, 1, 2, or 3) nucleotides from the nucleotide sequence of any one of the sense strands set forth in Table 2 or Table 3. In some embodiments, the antisense strand comprises at least 23 (e.g., 24, 25, 26, 27, 28, 29, 30 (e.g., 23)) contiguous nucleotides differing by no more than 3 (e.g., 0, 1, 2, or 3) nucleotides from the nucleotide sequence of any one of the antisense strands set forth in Table 2 or Table 3; and the sense strand comprises at least 21 (e.g., 22, 23, 24, 25, 26, 27, 28, 29, 30 (e.g., 21, 22, 23 (e.g., 21))) contiguous nucleotides differing by no more than 3 (e.g., 0, 1, 2, or 3) nucleotides from the nucleotide sequence of any one of the sense strands set forth in Table 2 or Table 3.

[0471] In some embodiments, the antisense strand comprises from about 15-23 (e.g., 15-22, 15-21, 15-20, 15-19, 15-18, 15-17, 15-16, 16-22, 16-20, 16-19, 16-18, 16-17, 17-23, 17-22, 17-21, 17-20, 17-19, 17-18, 18-23, 18-22, 18-21, 18-20, 18-19, 19-23, 19-22, 19-21, 19-20, 20-23, 20-22, 20-21, 21-23, 21-22, 22-23) contiguous nucleotides differing by no more than 3 (e.g., 0, 1, 2, or 3) nucleotides from the nucleotide sequence of any one of the antisense strands set forth in Table 2 or Table 3; and the sense strand comprises from about 15-23 (e.g., 15-22, 15-21, 15-20, 15-19, 15-18, 15-17, 15-16, 16-22, 16-20, 16-19, 16-18, 16-17, 17-23, 17-22, 17-21, 17-20, 17-19, 17-18, 18-23, 18-22, 18-21, 18-20, 18-19, 19-23, 19-22, 19-21, 19-20, 20-23, 20-22, 20-21, 21-23, 21-22, 22-23) contiguous nucleotides differing by no more than 3 (e.g., 0, 1, 2, or 3) nucleotides from the nucleotide sequence of any one of the sense strands set forth in Table 2 or Table 3. In some embodiments, the antisense strand comprises from about 19-23 (e.g., 19-22, 19-21, 19-20, 20-23, 20-22, 20-21, 21-23, 21-22, 22-23) contiguous nucleotides differing by no more than 3 (e.g., 0, 1, 2, or 3) nucleotides from the nucleotide sequence of any one of the antisense strands set forth in Table 2 or Table 3; and the sense strand comprises from about 19-23 (e.g., 19-22, 19-21, 19-20, 20-23, 20-22, 20-21, 21-23, 21-22, 22-23) contiguous nucleotides differing by no more than 3 (e.g., 0, 1, 2, or 3) nucleotides from the nucleotide sequence of any one of the sense strands set forth in Table 2 or Table 3. In some embodiments, the antisense strand comprises from about from about 21-23 (e.g., 21-22, 22-23) contiguous nucleotides differing by no more than 3 (e.g., 0, 1, 2, or 3) nucleotides from the nucleotide sequence of any one of the antisense strands set forth in Table 2 or Table 3; and the sense strand comprises from about 19-23 (e.g., 19-22, 19-21, 19-20, 20-23, 20-22, 20-21, 21-23, 21-22, 22-23) contiguous nucleotides differing by no more than 3 (e.g., 0, 1, 2, or 3) nucleotides from the nucleotide sequence of any one of the sense strands set forth in Table 2 or Table 3. In some embodiments, the antisense strand comprises from about 21-23 (e.g., 21-22, 22-23) contiguous nucleotides differing by no more than 3 (e.g., 0, 1, 2, or 3) nucleotides from the nucleotide sequence of any one of the antisense strands set forth in Table 2 or Table 3; and the sense strand comprises from about 21-23 (e.g., 21-22, 22-23) contiguous nucleotides differing by no more than 3 (e.g., 0, 1, 2, or 3) nucleotides from the nucleotide sequence of any one of the sense strands set forth in Table 2 or Table 3.

[0472] In some embodiments, the antisense strand comprises or consists of about 15, 16, 17, 18, 19, 20, 21, 22, 23, 24, 25, 26, 27, 28, 29, or 30 (e.g., 19, 20, 21, 22, 23 (e.g., 23)) contiguous nucleotides differing by no more than 3 (e.g., 0, 1, 2, or 3) nucleotides from the nucleotide sequence of any one of the antisense strands set forth in Table 2 or Table 3; and the sense strand comprises or consists of about 15, 16, 17, 18, 19, 20, 21, 22, 23, 24, 25, 26, 27, 28, 29, or 30 (e.g., 19, 20, 21, 22, 23 (e.g., 21)) contiguous nucleotides differing by no more than 3 (e.g., 0, 1, 2, or 3) nucleotides from the nucleotide sequence of any one of the sense strands set forth in Table 2 or Table 3. In some embodiments, the antisense strand comprises or consists of about 19, 20, 21, 22, 23, 24, 25, 26, 27, 28, 29, 30 (e.g., 19, 20, 21, 22, 23 (e.g., 23)) contiguous nucleotides differing by no more than 3 (e.g., 0, 1, 2, or 3) nucleotides from the nucleotide sequence of any one of the antisense strands set forth in Table 2 or Table 3; and the sense strand comprises or consists of 19, 20, 21, 22, 23, 24, 25, 26, 27, 28, 29, 30 (e.g., 19, 20, 21, 22, 23 (e.g., 21)) contiguous nucleotides differing by no more than 3 (e.g., 0, 1, 2, or 3) nucleotides from the nucleotide sequence of any one of the sense strands set forth in Table 2 or Table 3. In some embodiments, the antisense strand comprises or consists of about 21, 22, 23, 24, 25, 26, 27, 28, 29, 30 (e.g., 21, 22, 23 (e.g., 23)) contiguous nucleotides differing by no more than 3 (e.g., 0, 1, 2, or 3) nucleotides from the nucleotide sequence of any one of the antisense strands set forth in Table 2 or Table 3; and the sense strand comprises or consists of about 19, 20, 21, 22, 23, 24, 25, 26, 27, 28, 29, 30 (e.g., 19, 20, 21, 22, 23 (e.g., 21)) contiguous nucleotides differing by no more than 3 (e.g., 0, 1, 2, or 3) nucleotides from the nucleotide sequence of any one of the sense strands set forth in Table 2 or Table 3. In some embodiments, the antisense strand comprises or consists of about 21, 22, 23, 24, 25, 26, 27, 28, 29, 30 (e.g., 21, 22, 23 (e.g., 23)) contiguous nucleotides differing by no more than 3 (e.g., 0, 1, 2, or 3) nucleotides from the nucleotide sequence of any one of the antisense strands set forth in Table 2 or Table 3; and the sense strand comprises or consists of at about 21, 22, 23, 24, 25, 26, 27, 28, 29, 30 (e.g., 21, 22, 23 (e.g., 21)) contiguous nucleotides differing by no more than 3 (e.g., 0, 1, 2, or 3) nucleotides from the nucleotide sequence of any one of the sense strands set forth in Table 2 or Table 3. In some embodiments, the antisense strand comprises or consists of about 23, 24, 25, 26, 27, 28, 29, 30 (e.g., 23) contiguous nucleotides differing by no more than 3 (e.g., 0, 1, 2, or 3) nucleotides from the nucleotide sequence of any one of the antisense strands set forth in Table 2 or Table 3; and the sense strand comprises or consists of about 21, 22, 23, 24, 25, 26, 27, 28, 29, 30 (e.g., 21, 22, 23 (e.g., 21)) contiguous nucleotides differing by no more than 3 (e.g., 0, 1, 2, or 3) nucleotides from the nucleotide sequence of any one of the sense strands set forth in Table 2 or Table 3. In some embodiments, the antisense strand comprises or consists of about 23 contiguous nucleotides differing by no more than 3 (e.g., 0, 1, 2, or 3) nucleotides from the nucleotide sequence of any one of the antisense strands set forth in Table 2 or Table 3; and the sense strand comprises or consists of about 21 contiguous nucleotides differing by no more than 3 (e.g., 0, 1, 2, or 3) nucleotides from the nucleotide sequence of any one of the sense strands set forth in Table 2 or Table 3. In some embodiments, the antisense strand comprises or consists of about 21 contiguous nucleotides differing by no more than 3 (e.g., 0, 1, 2, or 3) nucleotides from the nucleotide sequence of any one of the antisense strands set forth in Table 2 or Table 3; and the sense strand comprises or consists of about 19 contiguous nucleotides differing by no more than 3 (e.g., 0, 1, 2, or 3) nucleotides from the nucleotide sequence of any one of the sense strands set forth in Table 2 or Table 3.

[0473] In some embodiments, the nucleotide sequence of the antisense strand comprises or consists of the nucleotide sequence of any one of the antisense strands set forth in Table 2 or Table 3 differing by no more than 3 (e.g., 0, 1, 2, or 3) nucleotides from the antisense strand set forth in Table 2 or Table 3; and the nucleotide sequence of the sense strand comprises or consists of the nucleotide sequence of any one of the sense strands set forth in Table 2 or Table 3 differing by no more than 3 (e.g., 0, 1, 2, or 3) nucleotides from the sense strand set forth in Table 2 or Table 3.

[0474] In some embodiments, the nucleotide sequence of the antisense strand comprises or consists of the nucleotide sequence of any one of any one of the antisense strands set forth in Table 2 or Table 3; and the nucleotide sequence of the sense strand comprises or consists of the nucleotide sequence of any one of the sense strands set forth in Table 2 or Table 3.

[0475] In some embodiments, the antisense strand comprises at least 15 (e.g., 15, 16, 17, 18, 19, 20, 21, 22, 23, 24, 25, 26, 27, 28, 29, 30 (e.g., 19, 20, 21, 22, 23 (e.g., 23))) contiguous nucleotides differing by no more than 3 (e.g., 0, 1, 2, or 3) nucleotides from the nucleotide sequence of any one of the antisense strands set forth in Table 2 or Table 3; and the sense strand comprises at least 15 (e.g., 15, 16, 17, 18, 19, 20, 21, 22, 23, 24, 25, 26, 27, 28, 29, 30 (e.g., 19, 20, 21, 22, 23 (e.g., 21))) contiguous nucleotides differing by no more than 3 (e.g., 0, 1, 2, or 3) nucleotides from the nucleotide sequence of the corresponding sense strand set forth in Table 2 or Table 3. In some embodiments, the antisense strand comprises at least 19 (e.g., 20, 21, 22, 23, 24, 25, 26, 27, 28, 29, 30 (e.g., 19, 20, 21, 22, 23 (e.g., 23))) contiguous nucleotides differing by no more than 3 (e.g., 0, 1, 2, or 3) nucleotides from the nucleotide sequence of any one of the antisense strands set forth in Table 2 or Table 3; and the sense strand comprises at least 19 (e.g., 20, 21, 22, 23, 24, 25, 26, 27, 28, 29, 30 (e.g., 19, 20, 21, 22, 23 (e.g., 21))) contiguous nucleotides differing by no more than 3 (e.g., 0, 1, 2, or 3) nucleotides from the nucleotide sequence of the corresponding sense strand set forth in Table 2 or Table 3. In some embodiments, the antisense strand comprises at least 21 (e.g., 22, 23, 24, 25, 26, 27, 28, 29, 30 (e.g., 21, 22, 23 (e.g., 23))) contiguous nucleotides differing by no more than 3 (e.g., 0, 1, 2, or 3) nucleotides from the nucleotide sequence of any one of the antisense strands set forth in Table 2 or Table 3; and the sense strand comprises at least 19 (e.g., 20, 21, 22, 23, 24, 25, 26, 27, 28, 29, 30 (e.g., 19, 20, 21, 22, 23 (e.g., 21))) contiguous nucleotides differing by no more than 3 (e.g., 0, 1, 2, or 3) nucleotides from the nucleotide sequence of the corresponding sense strand set forth in Table 2 or Table 3. In some embodiments, the antisense strand comprises at least 21 (e.g., 22, 23, 24, 25, 26, 27, 28, 29, 30 (e.g., 21, 22, 23 (e.g., 23))) contiguous nucleotides differing by no more than 3 (e.g., 0, 1, 2, or 3) nucleotides from the nucleotide sequence of any one of the antisense strands set forth in Table 2 or Table 3; and the sense strand comprises at least 21 (e.g., 22, 23, 24, 25, 26, 27, 28, 29, 30 (e.g., 21, 22, 23 (e.g., 21))) contiguous nucleotides differing by no more than 3 (e.g., 0, 1, 2, or 3) nucleotides from the nucleotide sequence of the corresponding sense strand set forth in Table 2 or Table 3. In some embodiments, the antisense strand comprises at least 23 (e.g., 24, 25, 26, 27, 28, 29, 30 (e.g., 23)) contiguous nucleotides differing by no more than 3 (e.g., 0, 1, 2, or 3) nucleotides from the nucleotide sequence of any one of the antisense strands set forth in Table 2 or Table 3; and the sense strand comprises at least 21 (e.g., 22, 23, 24, 25, 26, 27, 28, 29, 30 (e.g., 21, 22, 23 (e.g., 21))) contiguous nucleotides differing by no more than 3 (e.g., 0, 1, 2, or 3) nucleotides from the nucleotide sequence of the corresponding sense strand set forth in Table 2 or Table 3.

[0476] In some embodiments, the antisense strand comprises from about 15-23 (e.g., 15-22, 15-21, 15-20, 15-19, 15-18, 15-17, 15-16, 16-22, 16-20, 16-19, 16-18, 16-17, 17-23, 17-22, 17-21, 17-20, 17-19, 17-18, 18-23, 18-22, 18-21, 18-20, 18-19, 19-23, 19-22, 19-21, 19-20, 20-23, 20-22, 20-21, 21-23, 21-22, 22-23) contiguous nucleotides differing by no more than 3 (e.g., 0, 1, 2, or 3) nucleotides from the nucleotide sequence of any one of the antisense strands set forth in Table 2 or Table 3; and the sense strand comprises from about 15-23 (e.g., 15-22, 15-21, 15-20, 15-19, 15-18, 15-17, 15-16, 16-22, 16-20, 16-19, 16-18, 16-17, 17-23, 17-22, 17-21, 17-20, 17-19, 17-18, 18-23, 18-22, 18-21, 18-20, 18-19, 19-23, 19-22, 19-21, 19-20, 20-23, 20-22, 20-21, 21-23, 21-22, 22-23) contiguous nucleotides differing by no more than 3 (e.g., 0, 1, 2, or 3) nucleotides from the nucleotide sequence of the corresponding sense strand set forth in Table 2 or Table 3. In some embodiments, the antisense strand comprises from about 19-23 (e.g., 19-22, 19-21, 19-20, 20-23, 20-22, 20-21, 21-23, 21-22, 22-23) contiguous nucleotides differing by no more than 3 (e.g., 0, 1, 2, or 3) nucleotides from the nucleotide sequence of any one of the antisense strands set forth in Table 2 or Table 3; and the sense strand comprises from about 19-23 (e.g., 19-22, 19-21, 19-20, 20-23, 20-22, 20-21, 21-23, 21-22, 22-23) contiguous nucleotides differing by no more than 3 (e.g., 0, 1, 2, or 3) nucleotides from the nucleotide sequence of the corresponding sense strand set forth in Table 2 or Table 3. In some embodiments, the antisense strand comprises from about from about 21-23 (e.g., 21-22, 22-23) contiguous nucleotides differing by no more than 3 (e.g., 0, 1, 2, or 3) nucleotides from the nucleotide sequence of any one of the antisense strands set forth in Table 2 or Table 3; and the sense strand comprises from about 19-23 (e.g., 19-22, 19-21, 19-20, 20-23, 20-22, 20-21, 21-23, 21-22, 22-23) contiguous nucleotides differing by no more than 3 (e.g., 0, 1, 2, or 3) nucleotides from the nucleotide sequence of the corresponding sense strand set forth in Table 2 or Table 3. In some embodiments, the antisense strand comprises from about 21-23 (e.g., 21-22, 22-23) contiguous nucleotides differing by no more than 3 (e.g., 0, 1, 2, or 3) nucleotides from the nucleotide sequence of any one of the antisense strands set forth in Table 2 or Table 3; and the sense strand comprises from about 21-23 (e.g., 21-22, 22-23) contiguous nucleotides differing by no more than 3 (e.g., 0, 1, 2, or 3) nucleotides from the nucleotide sequence of the corresponding sense strand set forth in Table 2 or Table 3.

[0477] In some embodiments, the antisense strand comprises or consists of about 15, 16, 17, 18, 19, 20, 21, 22, 23, 24, 25, 26, 27, 28, 29, or 30 (e.g., 19, 20, 21, 22, 23 (e.g., 23)) contiguous nucleotides differing by no more than 3 (e.g., 0, 1, 2, or 3) nucleotides from the nucleotide sequence of any one of the antisense strands set forth in Table 2 or Table 3; and the sense strand comprises or consists of about 15, 16, 17, 18, 19, 20, 21, 22, 23, 24, 25, 26, 27, 28, 29, or 30 (e.g., 19, 20, 21, 22, 23 (e.g., 21)) contiguous nucleotides differing by no more than 3 (e.g., 0, 1, 2, or 3) nucleotides from the nucleotide sequence of the corresponding sense strand set forth in Table 2 or Table 3. In some embodiments, the antisense strand comprises or consists of about 19, 20, 21, 22, 23, 24, 25, 26, 27, 28, 29, 30 (e.g., 19, 20, 21, 22, 23 (e.g., 23)) contiguous nucleotides differing by no more than 3 (e.g., 0, 1, 2, or 3) nucleotides from the nucleotide sequence of any one of the antisense strands set forth in Table 2 or Table 3; and the sense strand comprises or consists of 19, 20, 21, 22, 23, 24, 25, 26, 27, 28, 29, 30 (e.g., 19, 20, 21, 22, 23 (e.g., 21)) contiguous nucleotides differing by no more than 3 (e.g., 0, 1, 2, or 3) nucleotides from the nucleotide sequence of the corresponding sense strand set forth in Table 2 or Table 3. In some embodiments, the antisense strand comprises or consists of about 21, 22, 23, 24, 25, 26, 27, 28, 29, 30 (e.g., 21, 22, 23 (e.g., 23)) contiguous nucleotides differing by no more than 3 (e.g., 0, 1, 2, or 3) nucleotides from the nucleotide sequence of any one of the antisense strands set forth in Table 2 or Table 3; and the sense strand comprises or consists of about 19, 20, 21, 22, 23, 24, 25, 26, 27, 28, 29, 30 (e.g., 19, 20, 21, 22, 23 (e.g., 21)) contiguous nucleotides differing by no more than 3 (e.g., 0, 1, 2, or 3) nucleotides from the nucleotide sequence of the corresponding sense strand set forth in Table 2 or Table 3. In some embodiments, the antisense strand comprises or consists of about 21, 22, 23, 24, 25, 26, 27, 28, 29, 30 (e.g., 21, 22, 23 (e.g., 23)) contiguous nucleotides differing by no more than 3 (e.g., 0, 1, 2, or 3) nucleotides from the nucleotide sequence of any one of the antisense strands set forth in Table 2 or Table 3; and the sense strand comprises or consists of at about 21, 22, 23, 24, 25, 26, 27, 28, 29, 30 (e.g., 21, 22, 23 (e.g., 21)) contiguous nucleotides differing by no more than 3 (e.g., 0, 1, 2, or 3) nucleotides from the nucleotide sequence of the corresponding sense strand set forth in Table 2 or Table 3. In some embodiments, the antisense strand comprises or consists of about 23, 24, 25, 26, 27, 28, 29, 30 (e.g., 23) contiguous nucleotides differing by no more than 3 (e.g., 0, 1, 2, or 3) nucleotides from the nucleotide sequence of any one of the antisense strands set forth in Table 2 or Table 3; and the sense strand comprises or consists of about 21, 22, 23, 24, 25, 26, 27, 28, 29, 30 (e.g., 21, 22, 23 (e.g., 21)) contiguous nucleotides differing by no more than 3 (e.g., 0, 1, 2, or 3) nucleotides from the nucleotide sequence of the corresponding sense strand set forth in Table 2 or Table 3. In some embodiments, the antisense strand comprises or consists of about 23 contiguous nucleotides differing by no more than 3 (e.g., 0, 1, 2, or 3) nucleotides from the nucleotide sequence of any one of the antisense strands set forth in Table 2 or Table 3; and the sense strand comprises or consists of about 21 contiguous nucleotides differing by no more than 3 (e.g., 0, 1, 2, or 3) nucleotides from the nucleotide sequence of the corresponding sense strand set forth in Table 2 or Table 3. In some embodiments, the antisense strand comprises or consists of about 21 contiguous nucleotides differing by no more than 3 (e.g., 0, 1, 2, or 3) nucleotides from the nucleotide sequence of any one of the antisense strands set forth in Table 2 or Table 3; and the sense strand comprises or consists of about 19 contiguous nucleotides differing by no more than 3 (e.g., 0, 1, 2, or 3) nucleotides from the nucleotide sequence of the corresponding sense strand set forth in Table 2 or Table 3.

[0478] In some embodiments, the nucleotide sequence of the antisense strand comprises or consists of the nucleotide sequence of any one of the antisense strands set forth in Table 2 or Table 3 differing by no more than 3 (e.g., 0, 1, 2, or 3) nucleotides from the antisense strand set forth in Table 2 or Table 3; and the nucleotide sequence of the sense strand comprises or consists of the nucleotide sequence of the corresponding sense strand set forth in Table 2 or Table 3 differing by no more than 3 (e.g., 0, 1, 2, or 3) nucleotides from the corresponding sense strand set forth in Table 2 or Table 3.

[0479] In some embodiments, the nucleotide sequence of the antisense strand comprises or consists of the nucleotide sequence of any one of any one of the antisense strands set forth in Table 2 or Table 3; and the nucleotide sequence of the sense strand comprises or consists of the nucleotide sequence of the corresponding sense strand set forth in Table 2 or Table 3.

[0480] In some embodiments, the nucleotide sequence of the sense strand differs by no more than 5 (e.g., 0, 1, 2, 3, 4, or 5) nucleotides from the nucleotide sequence set forth in any one of SEQ ID NOS: 4-186, 553-601, 658-892, or 1192; and the nucleotide sequence of the antisense strand comprises the nucleotide sequence set forth in any one of SEQ ID NOS: 187-369, 602-657, 893-1131, or 1188-1191 differing by no more than 5 (e.g., 0, 1, 2, 3, 4, or 5) nucleotides from the nucleotide sequence set forth in any one of SEQ ID NOS: 187-369, 602-657, 893-1131, or 1188-1191. In some embodiments, the nucleotide sequence of the sense strand differs by no more than 3 (e.g., 0, 1, 2, or 3) nucleotides from the nucleotide sequence set forth in any one of SEQ ID NOS: 4-186, 553-601, 658-892, or 1192; and the nucleotide sequence of the antisense strand comprises the nucleotide sequence set forth in any one of SEQ ID NOS: 187-369, 602-657, 893-1131, or 1188-1191 differing by no more than 3 (e.g., 0, 1, 2, or 3) nucleotides from the nucleotide sequence set forth in any one of SEQ ID NOS: 187-369, 602-657, 893-1131, or 1188-1191. In some embodiments, the nucleotide sequence of the sense strand differs by no more than 2 (e.g., 0, 1, or 2) nucleotides from the nucleotide sequence set forth in any one of SEQ ID NOS: 4-186, 553-601, 658-892, or 1192; and the nucleotide sequence of the antisense strand comprises the nucleotide sequence set forth in any one of SEQ ID NOS: 187-369, 602-657, 893-1131, or 1188-1191 differing by no more than 2 (e.g., 0, 1, or 2) nucleotides from the nucleotide sequence set forth in any one of SEQ ID NOS: 187-369, 602-657, 893-1131, or 1188-1191. In some embodiments, the nucleotide sequence of the sense strand differs by no more than 1 (e.g., 0 or 1) nucleotide from the nucleotide sequence set forth in any one of SEQ ID NOS: 4-186, 553-601, 658-892, or 1192; and the nucleotide sequence of the antisense strand comprises the nucleotide sequence set forth in any one of SEQ ID NOS: 187-369, 602-657, 893-1131, or 1188-1191 differing by no more than 1 (e.g., 0 or 1) nucleotide from the nucleotide sequence set forth in any one of SEQ ID NOS: 187-369, 602-657, 893-1131, or 1188-1191.

[0481] In some embodiments, the nucleotide sequence of the sense strand comprises the nucleotide sequence set forth in any one of SEQ ID NOS: 4-186, 553-601, 658-892, or 1192 differing by no more than 5 (e.g., 0, 1, 2, 3, 4, or 5) nucleotides from the nucleotide sequence set forth in any one of SEQ ID NOS: 4-186, 553-601, 658-892, or 1192; and the nucleotide sequence of the antisense strand differs by no more than 5 (e.g., 0, 1, 2, 3, 4, or 5) nucleotides from the nucleotide sequence set forth in any one of SEQ ID NOS: 187-369, 602-657, 893-1131, or 1188-1191. In some embodiments, the nucleotide sequence of the sense strand comprises the nucleotide sequence set forth in any one of SEQ ID NOS: 4-186, 553-601, 658-892, or 1192 differing by no more than 3 (e.g., 0, 1, 2, or 3) nucleotides from the nucleotide sequence set forth in any one of SEQ ID NOS: 4-186, 553-601, 658-892, or 1192; and the nucleotide sequence of the antisense strand differs by no more than 3 (e.g., 0, 1, 2, or 3) nucleotides from the nucleotide sequence set forth in any one of SEQ ID NOS: 187-369, 602-657, 893-1131, or 1188-1191. In some embodiments, the nucleotide sequence of the sense strand comprises the nucleotide sequence set forth in any one of SEQ ID NOS: 4-186, 553-601, 658-892, or 1192 differing by no more than 2 (e.g., 0, 1, or 2) nucleotides from the nucleotide sequence set forth in any one of SEQ ID NOS: 4-186, 553-601, 658-892, or 1192; and the nucleotide sequence of the antisense strand differs by no more than 2 (e.g., 0, 1, or 2) nucleotides from the nucleotide sequence set forth in any one of SEQ ID NOS: 187-369, 602-657, 893-1131, or 1188-1191. In some embodiments, the nucleotide sequence of the sense strand comprises the nucleotide sequence set forth in any one of SEQ ID NOS: 4-186, 553-601, 658-892, or 1192 differing by no more than 1 (e.g., 0 or 1) nucleotide from the nucleotide sequence set forth in any one of SEQ ID NOS: 4-186, 553-601, 658-892, or 1192; and the nucleotide sequence of the antisense strand differs by no more than 1 (e.g., 0 or 1) nucleotide from the nucleotide sequence set forth in any one of SEQ ID NOS: 187-369, 602-657, 893-1131, or 1188-1191.

[0482] In some embodiments, the nucleotide sequence of the sense strand is at least 85%, 86%, 87%, 88%, 89%, 90%, 91%, 92%, 93%, 94%, 95%, 96%, 97%, 98%, 99% or 100% identical to the nucleotide sequence set forth in any one of SEQ ID NOS: 4-186, 553-601, 658-892, or 1192; and the nucleotide sequence of the antisense strand is at least 85%, 86%, 87%, 88%, 89%, 90%, 91%, 92%, 93%, 94%, 95%, 96%, 97%, 98%, 99% or 100% identical to the nucleotide sequence set forth in any one of SEQ ID NOS: 187-369, 602-657, 893-1131, or 1188-1191. In some embodiments, the nucleotide sequence of the sense strand is at least 90%, 91%, 92%, 93%, 94%, 95%, 96%, 97%, 98%, 99% or 100% identical to the nucleotide sequence set forth in any one of SEQ ID NOS: 4-186, 553-601, 658-892, or 1192; and the nucleotide sequence of the antisense strand is at least 90%, 91%, 92%, 93%, 94%, 95%, 96%, 97%, 98%, 99% or 100% identical to the nucleotide sequence set forth in any one of SEQ ID NOS: 187-369, 602-657, 893-1131, or 1188-1191. In some embodiments, the nucleotide sequence of the sense strand is at least 95%, 96%, 97%, 98%, 99% or 100% identical to the nucleotide sequence set forth in any one of SEQ ID NOS: 4-186, 553-601, 658-892, or 1192; and the nucleotide sequence of the antisense strand is at least 95%, 96%, 97%, 98%, 99% or 100% identical to the nucleotide sequence set forth in any one of SEQ ID NOS: 187-369, 602-657, 893-1131, or 1188-1191. In some embodiments, the nucleotide sequence of the sense strand is at least 96%, 97%, 98%, 99% or 100% identical to the nucleotide sequence set forth in any one of SEQ ID NOS: 4-186, 553-601, 658-892, or 1192; and the nucleotide sequence of the antisense strand is at least 96%, 97%, 98%, 99% or 100% identical to the nucleotide sequence set forth in any one of SEQ ID NOS: 187-369, 602-657, 893-1131, or 1188-1191. In some embodiments, the nucleotide sequence of the sense strand is at least 97%, identical to the nucleotide sequence set forth in any one of SEQ ID NOS: 4-186, 553-601, 658-892, or 1192; and the nucleotide sequence of the antisense strand is at least 97%, identical to the nucleotide sequence set forth in any one of SEQ ID NOS: 187-369, 602-657, 893-1131, or 1188-1191. In some embodiments, the nucleotide sequence of the sense strand is at least 98% identical to the nucleotide sequence set forth in any one of SEQ ID NOS: 4-186, 553-601, 658-892, or 1192; and the nucleotide sequence of the antisense strand is at least 98% identical to the nucleotide sequence set forth in any one of SEQ ID NOS: 187-369, 602-657, 893-1131, or 1188-1191. In some embodiments, the nucleotide sequence of the sense strand is at least 99% identical to the nucleotide sequence set forth in any one of SEQ ID NOS: 4-186, 553-601, 658-892, or 1192; and the nucleotide sequence of the antisense strand is at least 99% identical to the nucleotide sequence set forth in any one of SEQ ID NOS: 187-369, 602-657, 893-1131, or 1188-1191. In some embodiments, the nucleotide sequence of the sense strand is 100% identical to the nucleotide sequence set forth in any one of SEQ ID NOS: 4-186, 553-601, 658-892, or 1192; and the nucleotide sequence of the antisense strand is 100% identical to the nucleotide sequence set forth in any one of SEQ ID NOS: 187-369, 602-657, 893-1131, or 1188-1191.

[0483] In some embodiments, the nucleotide sequence of the sense strand comprises the nucleotide sequence set forth in any one of SEQ ID NOS: 4-186, 553-601, 658-892, or 1192; and the nucleotide sequence of the antisense strand comprises the nucleotide sequence set forth in any one of SEQ ID NOS: 187-369, 602-657, 893-1131, or 1188-1191. In some embodiments, the nucleotide sequence of the sense strand consists of the nucleotide sequence set forth in any one of SEQ ID NOS: 4-186, 553-601, 658-892, or 1192; and the nucleotide sequence of the antisense strand consists of the nucleotide sequence set forth in any one of SEQ ID NOS: 187-369, 602-657, 893-1131, or 1188-1191.

[0484] In some embodiments, the nucleotide sequence of the sense strand differs by no more than 5 (e.g., 0, 1, 2, 3, 4, or 5) nucleotides from the nucleotide sequence set forth in any one of SEQ ID NOS: 4-186, 553-601, 658-892, or 1192. In some embodiments, the nucleotide sequence of the sense strand differs by no more than 3 (e.g., 0, 1, 2, or 3) nucleotides from the nucleotide sequence set forth in any one of SEQ ID NOS: 4-186, 553-601, 658-892, or 1192. In some embodiments, the nucleotide sequence of the sense strand differs by no more than 2 (e.g., 0, 1, or 2) nucleotides from the nucleotide sequence set forth in any one of SEQ ID NOS: 4-186, 553-601, 658-892, or 1192. In some embodiments, the nucleotide sequence of the sense strand differs by no more than 1 (e.g., 0 or 1) nucleotide from the nucleotide sequence set forth in any one of SEQ ID NOS: 4-186, 553-601, 658-892, or 1192.

[0485] In some embodiments, the antisense strand comprises at least 15 (e.g., 15, 16, 17, 18, 19, 20, 21, 22, 23, 24, 25, 26, 27, 28, 29, 30 (e.g., 19, 20, 21, 22, 23 (e.g., 23))) contiguous nucleotides differing by no more than 3 (e.g., 0, 1, 2, or 3) nucleotides from the nucleotide sequence of any one of the antisense strands set forth in any one of SEQ ID NOS: 187-369, 602-657, 893-1131, or 1188-1191; and the sense strand comprises at least 15 (e.g., 15, 16, 17, 18, 19, 20, 21, 22, 23, 24, 25, 26, 27, 28, 29, 30 (e.g., 19, 20, 21, 22, 23 (e.g., 21))) contiguous nucleotides differing by no more than 3 (e.g., 0, 1, 2, or 3) nucleotides from the nucleotide sequence of any one of the sense strands set forth in any one of SEQ ID NOS: 4-186, 553-601, 658-892, or 1192. In some embodiments, the antisense strand comprises at least 19 (e.g., 20, 21, 22, 23, 24, 25, 26, 27, 28, 29, 30 (e.g., 19, 20, 21, 22, 23 (e.g., 23))) contiguous nucleotides differing by no more than 3 (e.g., 0, 1, 2, or 3) nucleotides from the nucleotide sequence of any one of the antisense strands set forth in any one of SEQ ID NOS: 187-369, 602-657, 893-1131, or 1188-1191; and the sense strand comprises at least 19 (e.g., 20, 21, 22, 23, 24, 25, 26, 27, 28, 29, 30 (e.g., 19, 20, 21, 22, 23 (e.g., 21))) contiguous nucleotides differing by no more than 3 (e.g., 0, 1, 2, or 3) nucleotides from the nucleotide sequence of any one of the sense strands set forth in any one of SEQ ID NOS: 4-186, 553-601, 658-892, or 1192. In some embodiments, the antisense strand comprises at least 21 (e.g., 22, 23, 24, 25, 26, 27, 28, 29, 30 (e.g., 21, 22, 23 (e.g., 23))) contiguous nucleotides differing by no more than 3 (e.g., 0, 1, 2, or 3) nucleotides from the nucleotide sequence of any one of the antisense strands set forth in any one of SEQ ID NOS: 187-369, 602-657, 893-1131, or 1188-1191; and the sense strand comprises at least 19 (e.g., 20, 21, 22, 23, 24, 25, 26, 27, 28, 29, 30 (e.g., 19, 20, 21, 22, 23 (e.g., 21))) contiguous nucleotides differing by no more than 3 (e.g., 0, 1, 2, or 3) nucleotides from the nucleotide sequence of any one of the sense strands set forth in any one of SEQ ID NOS: 4-186, 553-601, 658-892, or 1192. In some embodiments, the antisense strand comprises at least 21 (e.g., 22, 23, 24, 25, 26, 27, 28, 29, 30 (e.g., 21, 22, 23 (e.g., 23))) contiguous nucleotides differing by no more than 3 (e.g., 0, 1, 2, or 3) nucleotides from the nucleotide sequence of any one of the antisense strands set forth in any one of SEQ ID NOS: 187-369, 602-657, 893-1131, or 1188-1191; and the sense strand comprises at least 21 (e.g., 22, 23, 24, 25, 26, 27, 28, 29, 30 (e.g., 21, 22, 23 (e.g., 21))) contiguous nucleotides differing by no more than 3 (e.g., 0, 1, 2, or 3) nucleotides from the nucleotide sequence of any one of the sense strands set forth in any one of SEQ ID NOS: 4-186, 553-601, 658-892, or 1192. In some embodiments, the antisense strand comprises at least 23 (e.g., 24, 25, 26, 27, 28, 29, 30 (e.g., 23)) contiguous nucleotides differing by no more than 3 (e.g., 0, 1, 2, or 3) nucleotides from the nucleotide sequence of any one of the antisense strands set forth in any one of SEQ ID NOS: 187-369, 602-657, 893-1131, or 1188-1191; and the sense strand comprises at least 21 (e.g., 22, 23, 24, 25, 26, 27, 28, 29, 30 (e.g., 21, 22, 23 (e.g., 21))) contiguous nucleotides differing by no more than 3 (e.g., 0, 1, 2, or 3) nucleotides from the nucleotide sequence of any one of the sense strands set forth in any one of SEQ ID NOS: 4-186, 553-601, 658-892, or 1192.

[0486] In some embodiments, the antisense strand comprises from about 15-23 (e.g., 15-22, 15-21, 15-20, 15-19, 15-18, 15-17, 15-16, 16-22, 16-20, 16-19, 16-18, 16-17, 17-23, 17-22, 17-21, 17-20, 17-19, 17-18, 18-23, 18-22, 18-21, 18-20, 18-19, 19-23, 19-22, 19-21, 19-20, 20-23, 20-22, 20-21, 21-23, 21-22, 22-23) contiguous nucleotides differing by no more than 3 (e.g., 0, 1, 2, or 3) nucleotides from the nucleotide sequence of any one of the antisense strands set forth in any one of SEQ ID NOS: 187-369, 602-657, 893-1131, or 1188-1191; and the sense strand comprises from about 15-23 (e.g., 15-22, 15-21, 15-20, 15-19, 15-18, 15-17, 15-16, 16-22, 16-20, 16-19, 16-18, 16-17, 17-23, 17-22, 17-21, 17-20, 17-19, 17-18, 18-23, 18-22, 18-21, 18-20, 18-19, 19-23, 19-22, 19-21, 19-20, 20-23, 20-22, 20-21, 21-23, 21-22, 22-23) contiguous nucleotides differing by no more than 3 (e.g., 0, 1, 2, or 3) nucleotides from the nucleotide sequence of any one of the sense strands set forth in any one of SEQ ID NOS: 4-186, 553-601, 658-892, or 1192. In some embodiments, the antisense strand comprises from about 19-23 (e.g., 19-22, 19-21, 19-20, 20-23, 20-22, 20-21, 21-23, 21-22, 22-23) contiguous nucleotides differing by no more than 3 (e.g., 0, 1, 2, or 3) nucleotides from the nucleotide sequence of any one of the antisense strands set forth in any one of SEQ ID NOS: 187-369, 602-657, 893-1131, or 1188-1191; and the sense strand comprises from about 19-23 (e.g., 19-22, 19-21, 19-20, 20-23, 20-22, 20-21, 21-23, 21-22, 22-23) contiguous nucleotides differing by no more than 3 (e.g., 0, 1, 2, or 3) nucleotides from the nucleotide sequence of any one of the sense strands set forth in any one of SEQ ID NOS: 4-186, 553-601, 658-892, or 1192. In some embodiments, the antisense strand comprises from about from about 21-23 (e.g., 21-22, 22-23) contiguous nucleotides differing by no more than 3 (e.g., 0, 1, 2, or 3) nucleotides from the nucleotide sequence of any one of the antisense strands set forth in any one of SEQ ID NOS: 187-369, 602-657, 893-1131, or 1188-1191; and the sense strand comprises from about 19-23 (e.g., 19-22, 19-21, 19-20, 20-23, 20-22, 20-21, 21-23, 21-22, 22-23) contiguous nucleotides differing by no more than 3 (e.g., 0, 1, 2, or 3) nucleotides from the nucleotide sequence of any one of the sense strands set forth in any one of SEQ ID NOS: 4-186, 553-601, 658-892, or 1192. In some embodiments, the antisense strand comprises from about 21-23 (e.g., 21-22, 22-23) contiguous nucleotides differing by no more than 3 (e.g., 0, 1, 2, or 3) nucleotides from the nucleotide sequence of any one of the antisense strands set forth in any one of SEQ ID NOS: 187-369, 602-657, 893-1131, or 1188-1191; and the sense strand comprises from about 21-23 (e.g., 21-22, 22-23) contiguous nucleotides differing by no more than 3 (e.g., 0, 1, 2, or 3) nucleotides from the nucleotide sequence of any one of the sense strands set forth in any one of SEQ ID NOS: 4-186, 553-601, 658-892, or 1192.

[0487] In some embodiments, the antisense strand comprises or consists of about 15, 16, 17, 18, 19, 20, 21, 22, 23, 24, 25, 26, 27, 28, 29, or 30 (e.g., 19, 20, 21, 22, 23 (e.g., 23)) contiguous nucleotides differing by no more than 3 (e.g., 0, 1, 2, or 3) nucleotides from the nucleotide sequence of any one of the antisense strands set forth in any one of SEQ ID NOS: 187-369, 602-657, 893-1131, or 1188-1191; and the sense strand comprises or consists of about 15, 16, 17, 18, 19, 20, 21, 22, 23, 24, 25, 26, 27, 28, 29, or 30 (e.g., 19, 20, 21, 22, 23 (e.g., 21)) contiguous nucleotides differing by no more than 3 (e.g., 0, 1, 2, or 3) nucleotides from the nucleotide sequence of any one of the sense strands set forth in any one of SEQ ID NOS: 4-186, 553-601, 658-892, or 1192. In some embodiments, the antisense strand comprises or consists of about 19, 20, 21, 22, 23, 24, 25, 26, 27, 28, 29, 30 (e.g., 19, 20, 21, 22, 23 (e.g., 23)) contiguous nucleotides differing by no more than 3 (e.g., 0, 1, 2, or 3) nucleotides from the nucleotide sequence of any one of the antisense strands set forth in any one of SEQ ID NOS: 187-369, 602-657, 893-1131, or 1188-1191; and the sense strand comprises or consists of 19, 20, 21, 22, 23, 24, 25, 26, 27, 28, 29, 30 (e.g., 19, 20, 21, 22, 23 (e.g., 21)) contiguous nucleotides differing by no more than 3 (e.g., 0, 1, 2, or 3) nucleotides from the nucleotide sequence of any one of the sense strands set forth in any one of SEQ ID NOS: 4-186, 553-601, 658-892, or 1192. In some embodiments, the antisense strand comprises or consists of about 21, 22, 23, 24, 25, 26, 27, 28, 29, 30 (e.g., 21, 22, 23 (e.g., 23)) contiguous nucleotides differing by no more than 3 (e.g., 0, 1, 2, or 3) nucleotides from the nucleotide sequence of any one of the antisense strands set forth in any one of SEQ ID NOS: 187-369, 602-657, 893-1131, or 1188-1191; and the sense strand comprises or consists of about 19, 20, 21, 22, 23, 24, 25, 26, 27, 28, 29, 30 (e.g., 19, 20, 21, 22, 23 (e.g., 21)) contiguous nucleotides differing by no more than 3 (e.g., 0, 1, 2, or 3) nucleotides from the nucleotide sequence of any one of the sense strands set forth in any one of SEQ ID NOS: 4-186, 553-601, 658-892, or 1192. In some embodiments, the antisense strand comprises or consists of about 21, 22, 23, 24, 25, 26, 27, 28, 29, 30 (e.g., 21, 22, 23 (e.g., 23)) contiguous nucleotides differing by no more than 3 (e.g., 0, 1, 2, or 3) nucleotides from the nucleotide sequence of any one of the antisense strands set forth in any one of SEQ ID NOS: 187-369, 602-657, 893-1131, or 1188-1191; and the sense strand comprises or consists of at about 21, 22, 23, 24, 25, 26, 27, 28, 29, 30 (e.g., 21, 22, 23 (e.g., 21)) contiguous nucleotides differing by no more than 3 (e.g., 0, 1, 2, or 3) nucleotides from the nucleotide sequence of any one of the sense strands set forth in any one of SEQ ID NOS: 4-186, 553-601, 658-892, or 1192. In some embodiments, the antisense strand comprises or consists of about 23, 24, 25, 26, 27, 28, 29, 30 (e.g., 23) contiguous nucleotides differing by no more than 3 (e.g., 0, 1, 2, or 3) nucleotides from the nucleotide sequence of any one of the antisense strands set forth in any one of SEQ ID NOS: 187-369, 602-657, 893-1131, or 1188-1191; and the sense strand comprises or consists of about 21, 22, 23, 24, 25, 26, 27, 28, 29, 30 (e.g., 21, 22, 23 (e.g., 21)) contiguous nucleotides differing by no more than 3 (e.g., 0, 1, 2, or 3) nucleotides from the nucleotide sequence of any one of the sense strands set forth in any one of SEQ ID NOS: 4-186, 553-601, 658-892, or 1192. In some embodiments, the antisense strand comprises or consists of about 23 contiguous nucleotides differing by no more than 3 (e.g., 0, 1, 2, or 3) nucleotides from the nucleotide sequence of any one of the antisense strands set forth in any one of SEQ ID NOS: 187-369, 602-657, 893-1131, or 1188-1191; and the sense strand comprises or consists of about 21 contiguous nucleotides differing by no more than 3 (e.g., 0, 1, 2, or 3) nucleotides from the nucleotide sequence of any one of the sense strands set forth in any one of SEQ ID NOS: 4-186, 553-601, 658-892, or 1192. In some embodiments, the antisense strand comprises or consists of about 21 contiguous nucleotides differing by no more than 3 (e.g., 0, 1, 2, or 3) nucleotides from the nucleotide sequence of any one of the antisense strands set forth in any one of SEQ ID NOS: 187-369, 602-657, 893-1131, or 1188-1191; and the sense strand comprises or consists of about 19 contiguous nucleotides differing by no more than 3 (e.g., 0, 1, 2, or 3) nucleotides from the nucleotide sequence of any one of the sense strands set forth in any one of SEQ ID NOS: 4-186, 553-601, 658-892, or 1192.

[0488] In some embodiments, the nucleotide sequence of the antisense strand comprises or consists of the nucleotide sequence of any one of the antisense strands set forth in any one of SEQ ID NOS: 187-369, 602-657, 893-1131, or 1188-1191 differing by no more than 3 (e.g., 0, 1, 2, or 3) nucleotides from the antisense strand set forth in any one of SEQ ID NOS: 187-369, 602-657, 893-1131, or 1188-1191; and the nucleotide sequence of the sense strand comprises or consists of the nucleotide sequence of any one of the sense strands set forth in any one of SEQ ID NOS: 4-186, 553-601, 658-892, or 1192 differing by no more than 3 (e.g., 0, 1, 2, or 3) nucleotides from the sense strand set forth in any one of SEQ ID NOS: 4-186, 553-601, 658-892, or 1192.

[0489] In some embodiments, the nucleotide sequence of the antisense strand comprises or consists of the nucleotide sequence of any one of any one of the antisense strands set forth in any one of SEQ ID NOS: 187-369, 602-657, 893-1131, or 1188-1191; and the nucleotide sequence of the sense strand comprises or consists of the nucleotide sequence of any one of the sense strands set forth in any one of SEQ ID NOS: 4-186, 553-601, 658-892, or 1192.

[0490] In some embodiments, the antisense strand comprises at least 15 (e.g., 15, 16, 17, 18, 19, 20, 21, 22, 23, 24, 25, 26, 27, 28, 29, 30 (e.g., 19, 20, 21, 22, 23 (e.g., 23))) contiguous nucleotides differing by no more than 3 (e.g., 0, 1, 2, or 3) nucleotides from the nucleotide sequence of any one of the antisense strands set forth in any one of SEQ ID NOS: 187-369, 602-657, 893-1131, or 1188-1191; and the sense strand comprises at least 15 (e.g., 15, 16, 17, 18, 19, 20, 21, 22, 23, 24, 25, 26, 27, 28, 29, 30 (e.g., 19, 20, 21, 22, 23 (e.g., 21))) contiguous nucleotides differing by no more than 3 (e.g., 0, 1, 2, or 3) nucleotides from the nucleotide sequence of the corresponding sense strand (e.g., as set forth in one of SEQ ID NOS: 4-186, 553-601, 658-892, or 1192). In some embodiments, the antisense strand comprises at least 19 (e.g., 20, 21, 22, 23, 24, 25, 26, 27, 28, 29, 30 (e.g., 19, 20, 21, 22, 23 (e.g., 23))) contiguous nucleotides differing by no more than 3 (e.g., 0, 1, 2, or 3) nucleotides from the nucleotide sequence of any one of the antisense strands set forth in any one of SEQ ID NOS: 187-369, 602-657, 893-1131, or 1188-1191; and the sense strand comprises at least 19 (e.g., 20, 21, 22, 23, 24, 25, 26, 27, 28, 29, 30 (e.g., 19, 20, 21, 22, 23 (e.g., 21))) contiguous nucleotides differing by no more than 3 (e.g., 0, 1, 2, or 3) nucleotides from the nucleotide sequence of the corresponding sense strand (e.g., as set forth in one of SEQ ID NOS: 4-186, 553-601, 658-892, or 1192). In some embodiments, the antisense strand comprises at least 21 (e.g., 22, 23, 24, 25, 26, 27, 28, 29, 30 (e.g., 21, 22, 23 (e.g., 23))) contiguous nucleotides differing by no more than 3 (e.g., 0, 1, 2, or 3) nucleotides from the nucleotide sequence of any one of the antisense strands set forth in any one of SEQ ID NOS: 187-369, 602-657, 893-1131, or 1188-1191; and the sense strand comprises at least 19 (e.g., 20, 21, 22, 23, 24, 25, 26, 27, 28, 29, 30 (e.g., 19, 20, 21, 22, 23 (e.g., 21))) contiguous nucleotides differing by no more than 3 (e.g., 0, 1, 2, or 3) nucleotides from the nucleotide sequence of the corresponding sense strand (e.g., as set forth in one of SEQ ID NOS: 4-186, 553-601, 658-892, or 1192). In some embodiments, the antisense strand comprises at least 21 (e.g., 22, 23, 24, 25, 26, 27, 28, 29, 30 (e.g., 21, 22, 23 (e.g., 23))) contiguous nucleotides differing by no more than 3 (e.g., 0, 1, 2, or 3) nucleotides from the nucleotide sequence of any one of the antisense strands set forth in any one of SEQ ID NOS: 187-369, 602-657, 893-1131, or 1188-1191; and the sense strand comprises at least 21 (e.g., 22, 23, 24, 25, 26, 27, 28, 29, 30 (e.g., 21, 22, 23 (e.g., 21))) contiguous nucleotides differing by no more than 3 (e.g., 0, 1, 2, or 3) nucleotides from the nucleotide sequence of the corresponding sense strand (e.g., as set forth in one of SEQ ID NOS: 4-186, 553-601, 658-892, or 1192). In some embodiments, the antisense strand comprises at least 23 (e.g., 24, 25, 26, 27, 28, 29, 30 (e.g., 23)) contiguous nucleotides differing by no more than 3 (e.g., 0, 1, 2, or 3) nucleotides from the nucleotide sequence of any one of the antisense strands set forth in any one of SEQ ID NOS: 187-369, 602-657, 893-1131, or 1188-1191; and the sense strand comprises at least 21 (e.g., 22, 23, 24, 25, 26, 27, 28, 29, 30 (e.g., 21, 22, 23 (e.g., 21))) contiguous nucleotides differing by no more than 3 (e.g., 0, 1, 2, or 3) nucleotides from the nucleotide sequence of the corresponding sense strand (e.g., as set forth in one of SEQ ID NOS: 4-186, 553-601, 658-892, or 1192).

[0491] In some embodiments, the antisense strand comprises from about 15-23 (e.g., 15-22, 15-21, 15-20, 15-19, 15-18, 15-17, 15-16, 16-22, 16-20, 16-19, 16-18, 16-17, 17-23, 17-22, 17-21, 17-20, 17-19, 17-18, 18-23, 18-22, 18-21, 18-20, 18-19, 19-23, 19-22, 19-21, 19-20, 20-23, 20-22, 20-21, 21-23, 21-22, 22-23) contiguous nucleotides differing by no more than 3 (e.g., 0, 1, 2, or 3) nucleotides from the nucleotide sequence of any one of the antisense strands set forth in any one of SEQ ID NOS: 187-369, 602-657, 893-1131, or 1188-1191; and the sense strand comprises from about 15-23 (e.g., 15-22, 15-21, 15-20, 15-19, 15-18, 15-17, 15-16, 16-22, 16-20, 16-19, 16-18, 16-17, 17-23, 17-22, 17-21, 17-20, 17-19, 17-18, 18-23, 18-22, 18-21, 18-20, 18-19, 19-23, 19-22, 19-21, 19-20, 20-23, 20-22, 20-21, 21-23, 21-22, 22-23) contiguous nucleotides differing by no more than 3 (e.g., 0, 1, 2, or 3) nucleotides from the nucleotide sequence of the corresponding sense strand (e.g., as set forth in one of SEQ ID NOS: 4-186, 553-601, 658-892, or 1192). In some embodiments, the antisense strand comprises from about 19-23 (e.g., 19-22, 19-21, 19-20, 20-23, 20-22, 20-21, 21-23, 21-22, 22-23) contiguous nucleotides differing by no more than 3 (e.g., 0, 1, 2, or 3) nucleotides from the nucleotide sequence of any one of the antisense strands set forth in any one of SEQ ID NOS: 187-369, 602-657, 893-1131, or 1188-1191; and the sense strand comprises from about 19-23 (e.g., 19-22, 19-21, 19-20, 20-23, 20-22, 20-21, 21-23, 21-22, 22-23) contiguous nucleotides differing by no more than 3 (e.g., 0, 1, 2, or 3) nucleotides from the nucleotide sequence of the corresponding sense strand (e.g., as set forth in one of SEQ ID NOS: 4-186, 553-601, 658-892, or 1192). In some embodiments, the antisense strand comprises from about from about 21-23 (e.g., 21-22, 22-23) contiguous nucleotides differing by no more than 3 (e.g., 0, 1, 2, or 3) nucleotides from the nucleotide sequence of any one of the antisense strands set forth in any one of SEQ ID NOS: 187-369, 602-657, 893-1131, or 1188-1191; and the sense strand comprises from about 19-23 (e.g., 19-22, 19-21, 19-20, 20-23, 20-22, 20-21, 21-23, 21-22, 22-23) contiguous nucleotides differing by no more than 3 (e.g., 0, 1, 2, or 3) nucleotides from the nucleotide sequence of the corresponding sense strand (e.g., as set forth in one of SEQ ID NOS: 4-186, 553-601, 658-892, or 1192). In some embodiments, the antisense strand comprises from about 21-23 (e.g., 21-22, 22-23) contiguous nucleotides differing by no more than 3 (e.g., 0, 1, 2, or 3) nucleotides from the nucleotide sequence of any one of the antisense strands set forth in any one of SEQ ID NOS: 187-369, 602-657, 893-1131, or 1188-1191; and the sense strand comprises from about 21-23 (e.g., 21-22, 22-23) contiguous nucleotides differing by no more than 3 (e.g., 0, 1, 2, or 3) nucleotides from the nucleotide sequence of the corresponding sense strand (e.g., as set forth in one of SEQ ID NOS: 4-186, 553-601, 658-892, or 1192).

[0492] In some embodiments, the antisense strand comprises or consists of about 15, 16, 17, 18, 19, 20, 21, 22, 23, 24, 25, 26, 27, 28, 29, or 30 (e.g., 19, 20, 21, 22, 23 (e.g., 23)) contiguous nucleotides differing by no more than 3 (e.g., 0, 1, 2, or 3) nucleotides from the nucleotide sequence of any one of the antisense strands set forth in any one of SEQ ID NOS: 187-369, 602-657, 893-1131, or 1188-1191; and the sense strand comprises or consists of about 15, 16, 17, 18, 19, 20, 21, 22, 23, 24, 25, 26, 27, 28, 29, or 30 (e.g., 19, 20, 21, 22, 23 (e.g., 21)) contiguous nucleotides differing by no more than 3 (e.g., 0, 1, 2, or 3) nucleotides from the nucleotide sequence of the corresponding sense strand (e.g., as set forth in one of SEQ ID NOS: 4-186, 553-601, 658-892, or 1192). In some embodiments, the antisense strand comprises or consists of about 19, 20, 21, 22, 23, 24, 25, 26, 27, 28, 29, 30 (e.g., 19, 20, 21, 22, 23 (e.g., 23)) contiguous nucleotides differing by no more than 3 (e.g., 0, 1, 2, or 3) nucleotides from the nucleotide sequence of any one of the antisense strands set forth in any one of SEQ ID NOS: 187-369, 602-657, 893-1131, or 1188-1191; and the sense strand comprises or consists of 19, 20, 21, 22, 23, 24, 25, 26, 27, 28, 29, 30 (e.g., 19, 20, 21, 22, 23 (e.g., 21)) contiguous nucleotides differing by no more than 3 (e.g., 0, 1, 2, or 3) nucleotides from the nucleotide sequence of the corresponding sense strand (e.g., as set forth in one of SEQ ID NOS: 4-186, 553-601, 658-892, or 1192). In some embodiments, the antisense strand comprises or consists of about 21, 22, 23, 24, 25, 26, 27, 28, 29, 30 (e.g., 21, 22, 23 (e.g., 23)) contiguous nucleotides differing by no more than 3 (e.g., 0, 1, 2, or 3) nucleotides from the nucleotide sequence of any one of the antisense strands set forth in any one of SEQ ID NOS: 187-369, 602-657, 893-1131, or 1188-1191; and the sense strand comprises or consists of about 19, 20, 21, 22, 23, 24, 25, 26, 27, 28, 29, 30 (e.g., 19, 20, 21, 22, 23 (e.g., 21)) contiguous nucleotides differing by no more than 3 (e.g., 0, 1, 2, or 3) nucleotides from the nucleotide sequence of the corresponding sense strand (e.g., as set forth in one of SEQ ID NOS: 4-186, 553-601, 658-892, or 1192). In some embodiments, the antisense strand comprises or consists of about 21, 22, 23, 24, 25, 26, 27, 28, 29, 30 (e.g., 21, 22, 23 (e.g., 23)) contiguous nucleotides differing by no more than 3 (e.g., 0, 1, 2, or 3) nucleotides from the nucleotide sequence of any one of the antisense strands set forth in any one of SEQ ID NOS: 187-369, 602-657, 893-1131, or 1188-1191; and the sense strand comprises or consists of at about 21, 22, 23, 24, 25, 26, 27, 28, 29, 30 (e.g., 21, 22, 23 (e.g., 21)) contiguous nucleotides differing by no more than 3 (e.g., 0, 1, 2, or 3) nucleotides from the nucleotide sequence of the corresponding sense strand (e.g., as set forth in one of SEQ ID NOS: 4-186, 553-601, 658-892, or 1192). In some embodiments, the antisense strand comprises or consists of about 23, 24, 25, 26, 27, 28, 29, 30 (e.g., 23) contiguous nucleotides differing by no more than 3 (e.g., 0, 1, 2, or 3) nucleotides from the nucleotide sequence of any one of the antisense strands set forth in any one of SEQ ID NOS: 187-369, 602-657, 893-1131, or 1188-1191; and the sense strand comprises or consists of about 21, 22, 23, 24, 25, 26, 27, 28, 29, 30 (e.g., 21, 22, 23 (e.g., 21)) contiguous nucleotides differing by no more than 3 (e.g., 0, 1, 2, or 3) nucleotides from the nucleotide sequence of the corresponding sense strand (e.g., as set forth in one of SEQ ID NOS: 4-186, 553-601, 658-892, or 1192). In some embodiments, the antisense strand comprises or consists of about 23 contiguous nucleotides differing by no more than 3 (e.g., 0, 1, 2, or 3) nucleotides from the nucleotide sequence of any one of the antisense strands set forth in any one of SEQ ID NOS: 187-369, 602-657, 893-1131, or 1188-1191; and the sense strand comprises or consists of about 21 contiguous nucleotides differing by no more than 3 (e.g., 0, 1, 2, or 3) nucleotides from the nucleotide sequence of the corresponding sense strand (e.g., as set forth in one of SEQ ID NOS: 4-186, 553-601, 658-892, or 1192). In some embodiments, the antisense strand comprises or consists of about 21 contiguous nucleotides differing by no more than 3 (e.g., 0, 1, 2, or 3) nucleotides from the nucleotide sequence of any one of the antisense strands set forth in any one of SEQ ID NOS: 187-369, 602-657, 893-1131, or 1188-1191; and the sense strand comprises or consists of about 19 contiguous nucleotides differing by no more than 3 (e.g., 0, 1, 2, or 3) nucleotides from the nucleotide sequence of the corresponding sense strand (e.g., as set forth in one of SEQ ID NOS: 4-186, 553-601, 658-892, or 1192).

[0493] In some embodiments, the nucleotide sequence of the antisense strand comprises or consists of the nucleotide sequence of any one of the antisense strands set forth in any one of SEQ ID NOS: 187-369, 602-657, 893-1131, or 1188-1191 differing by no more than 3 (e.g., 0, 1, 2, or 3) nucleotides from the antisense strand set forth in any one of SEQ ID NOS: 187-369, 602-657, 893-1131, or 1188-1191; and the nucleotide sequence of the sense strand comprises or consists of the nucleotide sequence of the corresponding sense strand (e.g., as set forth in one of SEQ ID NOS: 4-186, 553-601, 658-892, or 1192) differing by no more than 3 (e.g., 0, 1, 2, or 3) nucleotides from the sense strand set forth in any one of SEQ ID NOS: 4-186, 553-601, 658-892, or 1192.

[0494] In some embodiments, the nucleotide sequence of the antisense strand comprises or consists of the nucleotide sequence of any one of any one of the antisense strands set forth in any one of SEQ ID NOS: 187-369, 602-657, 893-1131, or 1188-1191; and the nucleotide sequence of the sense strand comprises or consists of the nucleotide sequence of the corresponding sense strand (e.g., as set forth in one of SEQ ID NOS: 4-186, 553-601, 658-892, or 1192).

[0495] In some embodiments, the nucleotide sequence of the antisense strand differs by no more than 5 (e.g., 0, 1, 2, 3, 4, or 5) nucleotides from the nucleotide sequence set forth in SEQ ID NO: 355; and the nucleotide sequence of the sense strand differs by no more than 5 (e.g., 0, 1, 2, 3, 4, or 5) nucleotides from the nucleotide sequence set forth in SEQ ID NO: 172. In some embodiments, the nucleotide sequence of the antisense strand differs by no more than 3 (e.g., 0, 1, 2, or 3) nucleotides from the nucleotide sequence set forth in SEQ ID NO: 355; and the nucleotide sequence of the sense strand differs by no more than 3 (e.g., 0, 1, 2, or 3) nucleotides from the nucleotide sequence set forth in SEQ ID NO: 172. In some embodiments, the nucleotide sequence of the antisense strand differs by no more than 2 (e.g., 0, 1, or 2) nucleotides from the nucleotide sequence set forth in SEQ ID NO: 355; and the nucleotide sequence of the sense strand differs by no more than 2 (e.g., 0, 1, or 2) nucleotides from the nucleotide sequence set forth in SEQ ID NO: 172. In some embodiments, the nucleotide sequence of the antisense strand differs by no more than 1 (e.g., 0 or 1) nucleotide from the nucleotide sequence set forth in SEQ ID NO: 355; and the nucleotide sequence of the sense strand differs by no more than 1 (e.g., 0 or 1) nucleotide from the nucleotide sequence set forth in SEQ ID NO: 172.

[0496] In some embodiments, the nucleotide sequence of the antisense strand comprises the nucleotide sequence set forth in SEQ ID NO: 355 differing by no more than 5 (e.g., 0, 1, 2, 3, 4, or 5) nucleotides from the nucleotide sequence set forth in SEQ ID NO: 355; and the nucleotide sequence of the sense strand comprises the nucleotide sequence set forth in SEQ ID NO: 355 differing by no more than 5 (e.g., 0, 1, 2, 3, 4, or 5) nucleotides from the nucleotide sequence set forth in SEQ ID NO: 172. In some embodiments, the nucleotide sequence of the antisense strand comprises the nucleotide sequence set forth in SEQ ID NO: 355 differing by no more than 3 (e.g., 0, 1, 2, or 3) nucleotides from the nucleotide sequence set forth in SEQ ID NO: 355; and the nucleotide sequence of the sense strand comprises the nucleotide sequence set forth in SEQ ID NO: 172 differing by no more than 3 (e.g., 0, 1, 2, or 3) nucleotides from the nucleotide sequence set forth in SEQ ID NO: 172. In some embodiments, the nucleotide sequence of the antisense strand comprises the nucleotide sequence set forth in SEQ ID NO: 355 differing by no more than 2 (e.g., 0, 1, or 2) nucleotides from the nucleotide sequence set forth in SEQ ID NO: 355; and the nucleotide sequence of the sense strand comprises the nucleotide sequence set forth in SEQ ID NO: 172 differing by no more than 2 (e.g., 0, 1, or 2) nucleotides from the nucleotide sequence set forth in SEQ ID NO: 172. In some embodiments, the nucleotide sequence of the antisense strand comprises the nucleotide sequence set forth in SEQ ID NO: 355 differing by no more than 1 (e.g., 0 or 1) nucleotide from nucleotide sequence set forth in SEQ ID NO: 355; and the nucleotide sequence of the sense strand comprises the nucleotide sequence set forth in SEQ ID NO: 172 differing by no more than 1 (e.g., 0 or 1) nucleotide from nucleotide sequence set forth in SEQ ID NO: 172.

[0497] In some embodiments, the nucleotide sequence of the antisense strand is at least 85%, 86%, 87%, 88%, 89%, 90%, 91%, 92%, 93%, 94%, 95%, 96%, 97%, 98%, 99% or 100% identical to the nucleotide sequence set forth in SEQ ID NO: 355; and the nucleotide sequence of the sense strand is at least 85%, 86%, 87%, 88%, 89%, 90%, 91%, 92%, 93%, 94%, 95%, 96%, 97%, 98%, 99% or 100% identical to the nucleotide sequence set forth in SEQ ID NO: 172. In some embodiments, the nucleotide sequence of the antisense strand is at least 90%, 91%, 92%, 93%, 94%, 95%, 96%, 97%, 98%, 99% or 100% identical to the nucleotide sequence set forth in SEQ ID NO: 355; and the nucleotide sequence of the sense strand is at least 90%, 91%, 92%, 93%, 94%, 95%, 96%, 97%, 98%, 99% or 100% identical to the nucleotide sequence set forth in SEQ ID NO: 172. In some embodiments, the nucleotide sequence of the antisense strand is at least 95%, 96%, 97%, 98%, 99% or 100% identical to the nucleotide sequence set forth in SEQ ID NO: 355; and the nucleotide sequence of the sense strand is at least 95%, 96%, 97%, 98%, 99% or 100% identical to the nucleotide sequence set forth in SEQ ID NO: 172. In some embodiments, the nucleotide sequence of the antisense strand is at least 96%, 97%, 98%, 99% or 100% identical to the nucleotide sequence set forth in SEQ ID NO: 355; and the nucleotide sequence of the sense strand is at least 96%, 97%, 98%, 99% or 100% identical to the nucleotide sequence set forth in SEQ ID NO: 172. In some embodiments, the nucleotide sequence of the antisense strand is at least 97%, identical to the nucleotide sequence set forth in SEQ ID NO: 355; and the nucleotide sequence of the sense strand is at least 97%, identical to the nucleotide sequence set forth in SEQ ID NO: 172. In some embodiments, the nucleotide sequence of the antisense strand is at least 98% identical to the nucleotide sequence set forth in SEQ ID NO: 355; and the nucleotide sequence of the sense strand is at least 98% identical to the nucleotide sequence set forth in SEQ ID NO: 172. In some embodiments, the nucleotide sequence of the antisense strand is at least 99% identical to the nucleotide sequence set forth in SEQ ID NO: 355; and the nucleotide sequence of the sense strand is at least 99% identical to the nucleotide sequence set forth in SEQ ID NO: 172. In some embodiments, the nucleotide sequence of the antisense strand is 100% identical to the nucleotide sequence set forth in SEQ ID NO: 355; and the nucleotide sequence of the sense strand is 100% identical to the nucleotide sequence set forth in SEQ ID NO: 172.

[0498] In some embodiments, the nucleotide sequence of the antisense strand comprises the nucleotide sequence set forth in SEQ ID NO: 355; and the nucleotide sequence of the sense strand comprises the nucleotide sequence set forth in SEQ ID NO: 172. In some embodiments, the nucleotide sequence of the antisense strand consists of the nucleotide sequence set forth in SEQ ID NO: 355; and the nucleotide sequence of the sense strand consists of the nucleotide sequence set forth in SEQ ID NO: 172.

[0499] In some embodiments, the antisense strand comprises at least 15 (e.g., 15, 16, 17, 18, 19, 20, 21, 22, 23, 24, 25, 26, 27, 28, 29, 30 (e.g., 19, 20, 21, 22, 23 (e.g., 23))) contiguous nucleotides differing by no more than 3 (e.g., 0, 1, 2, or 3) nucleotides from the nucleotide sequence of the antisense strand set forth in SEQ ID NO: 355; and the sense strand comprises at least 15 (e.g., 15, 16, 17, 18, 19, 20, 21, 22, 23, 24, 25, 26, 27, 28, 29, 30 (e.g., 19, 20, 21, 22, 23 (e.g., 21))) contiguous nucleotides differing by no more than 3 (e.g., 0, 1, 2, or 3) nucleotides from the nucleotide sequence of the sense strand set forth in SEQ ID NO: 172. In some embodiments, the antisense strand comprises at least 19 (e.g., 20, 21, 22, 23, 24, 25, 26, 27, 28, 29, 30 (e.g., 19, 20, 21, 22, 23 (e.g., 23))) contiguous nucleotides differing by no more than 3 (e.g., 0, 1, 2, or 3) nucleotides from the nucleotide sequence of the antisense strand set forth in SEQ ID NO: 355; and the sense strand comprises at least 19 (e.g., 20, 21, 22, 23, 24, 25, 26, 27, 28, 29, 30 (e.g., 19, 20, 21, 22, 23 (e.g., 21))) contiguous nucleotides differing by no more than 3 (e.g., 0, 1, 2, or 3) nucleotides from the nucleotide sequence of the sense strand set forth in SEQ ID NO: 172. In some embodiments, the antisense strand comprises at least 21 (e.g., 22, 23, 24, 25, 26, 27, 28, 29, 30 (e.g., 21, 22, 23 (e.g., 23))) contiguous nucleotides differing by no more than 3 (e.g., 0, 1, 2, or 3) nucleotides from the nucleotide sequence of the antisense strand set forth in SEQ ID NO: 355; and the sense strand comprises at least 19 (e.g., 20, 21, 22, 23, 24, 25, 26, 27, 28, 29, 30 (e.g., 19, 20, 21, 22, 23 (e.g., 21))) contiguous nucleotides differing by no more than 3 (e.g., 0, 1, 2, or 3) nucleotides from the nucleotide sequence of the sense strand set forth in SEQ ID NO: 172. In some embodiments, the antisense strand comprises at least 21 (e.g., 22, 23, 24, 25, 26, 27, 28, 29, 30 (e.g., 21, 22, 23 (e.g., 23))) contiguous nucleotides differing by no more than 3 (e.g., 0, 1, 2, or 3) nucleotides from the nucleotide sequence of the antisense strand set forth in SEQ ID NO: 355; and the sense strand comprises at least 21 (e.g., 22, 23, 24, 25, 26, 27, 28, 29, 30 (e.g., 21, 22, 23 (e.g., 21))) contiguous nucleotides differing by no more than 3 (e.g., 0, 1, 2, or 3) nucleotides from the nucleotide sequence of the sense strand set forth in SEQ ID NO: 172. In some embodiments, the antisense strand comprises at least 23 (e.g., 24, 25, 26, 27, 28, 29, 30 (e.g., 23)) contiguous nucleotides differing by no more than 3 (e.g., 0, 1, 2, or 3) nucleotides from the nucleotide sequence of the antisense strand set forth in SEQ ID NO: 355; and the sense strand comprises at least 21 (e.g., 22, 23, 24, 25, 26, 27, 28, 29, 30 (e.g., 21, 22, 23 (e.g., 21))) contiguous nucleotides differing by no more than 3 (e.g., 0, 1, 2, or 3) nucleotides from the nucleotide sequence of the sense strand set forth in SEQ ID NO: 172.

[0500] In some embodiments, the antisense strand comprises from about 15-23 (e.g., 15-22, 15-21, 15-20, 15-19, 15-18, 15-17, 15-16, 16-22, 16-20, 16-19, 16-18, 16-17, 17-23, 17-22, 17-21, 17-20, 17-19, 17-18, 18-23, 18-22, 18-21, 18-20, 18-19, 19-23, 19-22, 19-21, 19-20, 20-23, 20-22, 20-21, 21-23, 21-22, 22-23) contiguous nucleotides differing by no more than 3 (e.g., 0, 1, 2, or 3) nucleotides from the nucleotide sequence of the antisense strand set forth in SEQ ID NO: 355; and the sense strand comprises from about 15-23 (e.g., 15-22, 15-21, 15-20, 15-19, 15-18, 15-17, 15-16, 16-22, 16-20, 16-19, 16-18, 16-17, 17-23, 17-22, 17-21, 17-20, 17-19, 17-18, 18-23, 18-22, 18-21, 18-20, 18-19, 19-23, 19-22, 19-21, 19-20, 20-23, 20-22, 20-21, 21-23, 21-22, 22-23) contiguous nucleotides differing by no more than 3 (e.g., 0, 1, 2, or 3) nucleotides from the nucleotide sequence of the sense strand set forth in SEQ ID NO: 172. In some embodiments, the antisense strand comprises from about 19-23 (e.g., 19-22, 19-21, 19-20, 20-23, 20-22, 20-21, 21-23, 21-22, 22-23) contiguous nucleotides differing by no more than 3 (e.g., 0, 1, 2, or 3) nucleotides from the nucleotide sequence of the antisense strand set forth in SEQ ID NO: 355; and the sense strand comprises from about 19-23 (e.g., 19-22, 19-21, 19-20, 20-23, 20-22, 20-21, 21-23, 21-22, 22-23) contiguous nucleotides differing by no more than 3 (e.g., 0, 1, 2, or 3) nucleotides from the nucleotide sequence of the sense strand set forth in SEQ ID NO: 172. In some embodiments, the antisense strand comprises from about from about 21-23 (e.g., 21-22, 22-23) contiguous nucleotides differing by no more than 3 (e.g., 0, 1, 2, or 3) nucleotides from the nucleotide sequence of the antisense strand set forth in SEQ ID NO: 355; and the sense strand comprises from about 19-23 (e.g., 19-22, 19-21, 19-20, 20-23, 20-22, 20-21, 21-23, 21-22, 22-23) contiguous nucleotides differing by no more than 3 (e.g., 0, 1, 2, or 3) nucleotides from the nucleotide sequence of the sense strand set forth in SEQ ID NO: 172. In some embodiments, the antisense strand comprises from about 21-23 (e.g., 21-22, 22-23) contiguous nucleotides differing by no more than 3 (e.g., 0, 1, 2, or 3) nucleotides from the nucleotide sequence of the antisense strand set forth in SEQ ID NO: 355; and the sense strand comprises from about 21-23 (e.g., 21-22, 22-23) contiguous nucleotides differing by no more than 3 (e.g., 0, 1, 2, or 3) nucleotides from the nucleotide sequence of the sense strand set forth in SEQ ID NO: 172.

[0501] In some embodiments, the antisense strand comprises about 15, 16, 17, 18, 19, 20, 21, 22, 23, 24, 25, 26, 27, 28, 29, or 30 (e.g., 19, 20, 21, 22, 23 (e.g., 23)) contiguous nucleotides differing by no more than 3 (e.g., 0, 1, 2, or 3) nucleotides from the nucleotide sequence of the antisense strand set forth in SEQ ID NO: 355; and the sense strand comprises about 15, 16, 17, 18, 19, 20, 21, 22, 23, 24, 25, 26, 27, 28, 29, or 30 (e.g., 19, 20, 21, 22, 23 (e.g., 21)) contiguous nucleotides differing by no more than 3 (e.g., 0, 1, 2, or 3) nucleotides from the nucleotide sequence of the sense strand set forth in SEQ ID NO: 172. In some embodiments, the antisense strand comprises about 19, 20, 21, 22, 23, 24, 25, 26, 27, 28, 29, 30 (e.g., 19, 20, 21, 22, 23 (e.g., 23)) contiguous nucleotides differing by no more than 3 (e.g., 0, 1, 2, or 3) nucleotides from the nucleotide sequence of the antisense strand set forth in SEQ ID NO: 355; and the sense strand comprises 19, 20, 21, 22, 23, 24, 25, 26, 27, 28, 29, 30 (e.g., 19, 20, 21, 22, 23 (e.g., 21)) contiguous nucleotides differing by no more than 3 (e.g., 0, 1, 2, or 3) nucleotides from the nucleotide sequence of the sense strand set forth in SEQ ID NO: 172. In some embodiments, the antisense strand comprises about 21, 22, 23, 24, 25, 26, 27, 28, 29, 30 (e.g., 21, 22, 23 (e.g., 23)) contiguous nucleotides differing by no more than 3 (e.g., 0, 1, 2, or 3) nucleotides from the nucleotide sequence of the antisense strand set forth in SEQ ID NO: 355; and the sense strand about 19, 20, 21, 22, 23, 24, 25, 26, 27, 28, 29, 30 (e.g., 19, 20, 21, 22, 23 (e.g., 21)) contiguous nucleotides differing by no more than 3 (e.g., 0, 1, 2, or 3) nucleotides from the nucleotide sequence of the sense strand set forth in SEQ ID NO: 172. In some embodiments, the antisense strand comprises about 21, 22, 23, 24, 25, 26, 27, 28, 29, 30 (e.g., 21, 22, 23 (e.g., 23)) contiguous nucleotides differing by no more than 3 (e.g., 0, 1, 2, or 3) nucleotides from the nucleotide sequence of the antisense strand set forth in SEQ ID NO: 355; and the sense strand comprises about 21, 22, 23, 24, 25, 26, 27, 28, 29, 30 (e.g., 21, 22, 23 (e.g., 21)) contiguous nucleotides differing by no more than 3 (e.g., 0, 1, 2, or 3) nucleotides from the nucleotide sequence of the sense strand set forth in SEQ ID NO: 172. In some embodiments, the antisense strand comprises about 23, 24, 25, 26, 27, 28, 29, 30 (e.g., 23) contiguous nucleotides differing by no more than 3 (e.g., 0, 1, 2, or 3) nucleotides from the nucleotide sequence of the antisense strand set forth in SEQ ID NO: 355; and the sense strand comprises about 21, 22, 23, 24, 25, 26, 27, 28, 29, 30 (e.g., 21, 22, 23 (e.g., 21)) contiguous nucleotides differing by no more than 3 (e.g., 0, 1, 2, or 3) nucleotides from the nucleotide sequence of the sense strand set forth in SEQ ID NO: 172. In some embodiments, the antisense strand comprises about 23 contiguous nucleotides differing by no more than 3 (e.g., 0, 1, 2, or 3) nucleotides from the nucleotide sequence of the antisense strand set forth in SEQ ID NO: 355; and the sense strand comprises about 21 contiguous nucleotides differing by no more than 3 (e.g., 0, 1, 2, or 3) nucleotides from the nucleotide sequence of the sense strand set forth in SEQ ID NO: 172. In some embodiments, the antisense strand comprises about 21 contiguous nucleotides differing by no more than 3 (e.g., 0, 1, 2, or 3) nucleotides from the nucleotide sequence of the antisense strand set forth in SEQ ID NO: 355; and the sense strand comprises about 19 contiguous nucleotides differing by no more than 3 (e.g., 0, 1, 2, or 3) nucleotides from the nucleotide sequence of the sense strand set forth in SEQ ID NO: 172.

[0502] In some embodiments, the nucleotide sequence of the antisense strand comprises the nucleotide sequence of the antisense strand set forth in SEQ ID NO: 355 differing by no more than 3 (e.g., 0, 1, 2, or 3) nucleotides from the nucleotide sequence of the antisense strand set forth in SEQ ID NO: 355; and the nucleotide sequence of the sense strand comprises the nucleotide sequence of the sense strand set forth in SEQ ID NO: 172 differing by no more than 3 (e.g., 0, 1, 2, or 3) nucleotides from the sense strand set forth in SEQ ID NO: 172.

[0503] In some embodiments, the nucleotide sequence of the antisense strand comprises the nucleotide sequence of antisense strand set forth in SEQ ID NO: 355; and the nucleotide sequence of the sense strand comprises the nucleotide sequence of the sense strand set forth in SEQ ID NO: 172.

[0504] In some embodiments, the antisense strand consists of about 15, 16, 17, 18, 19, 20, 21, 22, 23, 24, 25, 26, 27, 28, 29, or 30 (e.g., 19, 20, 21, 22, 23 (e.g., 23)) contiguous nucleotides differing by no more than 3 (e.g., 0, 1, 2, or 3) nucleotides from the nucleotide sequence of the antisense strand set forth in SEQ ID NO: 355; and the sense strand consists of about 15, 16, 17, 18, 19, 20, 21, 22, 23, 24, 25, 26, 27, 28, 29, or 30 (e.g., 19, 20, 21, 22, 23 (e.g., 21)) contiguous nucleotides differing by no more than 3 (e.g., 0, 1, 2, or 3) nucleotides from the nucleotide sequence of the sense strand set forth in SEQ ID NO: 172. In some embodiments, the antisense strand consists of about 19, 20, 21, 22, 23, 24, 25, 26, 27, 28, 29, 30 (e.g., 19, 20, 21, 22, 23 (e.g., 23)) contiguous nucleotides differing by no more than 3 (e.g., 0, 1, 2, or 3) nucleotides from the nucleotide sequence of the antisense strand set forth in SEQ ID NO: 355; and the sense strand consists of 19, 20, 21, 22, 23, 24, 25, 26, 27, 28, 29, 30 (e.g., 19, 20, 21, 22, 23 (e.g., 21)) contiguous nucleotides differing by no more than 3 (e.g., 0, 1, 2, or 3) nucleotides from the nucleotide sequence of the sense strand set forth in SEQ ID NO: 172. In some embodiments, the antisense strand consists of about 21, 22, 23, 24, 25, 26, 27, 28, 29, 30 (e.g., 21, 22, 23 (e.g., 23)) contiguous nucleotides differing by no more than 3 (e.g., 0, 1, 2, or 3) nucleotides from the nucleotide sequence of the antisense strand set forth in SEQ ID NO: 355; and the sense strand consists of about 19, 20, 21, 22, 23, 24, 25, 26, 27, 28, 29, 30 (e.g., 19, 20, 21, 22, 23 (e.g., 21)) contiguous nucleotides differing by no more than 3 (e.g., 0, 1, 2, or 3) nucleotides from the nucleotide sequence of the sense strand set forth in SEQ ID NO: 172. In some embodiments, the antisense strand consists of about 21, 22, 23, 24, 25, 26, 27, 28, 29, 30 (e.g., 21, 22, 23 (e.g., 23)) contiguous nucleotides differing by no more than 3 (e.g., 0, 1, 2, or 3) nucleotides from the nucleotide sequence of the antisense strand set forth in SEQ ID NO: 355; and the sense strand consists of at about 21, 22, 23, 24, 25, 26, 27, 28, 29, 30 (e.g., 21, 22, 23 (e.g., 21)) contiguous nucleotides differing by no more than 3 (e.g., 0, 1, 2, or 3) nucleotides from the nucleotide sequence of the sense strand set forth in SEQ ID NO: 172. In some embodiments, the antisense strand consists of about 23, 24, 25, 26, 27, 28, 29, 30 (e.g., 23) contiguous nucleotides differing by no more than 3 (e.g., 0, 1, 2, or 3) nucleotides from the nucleotide sequence of the antisense strand set forth in SEQ ID NO: 355; and the sense strand consists of about 21, 22, 23, 24, 25, 26, 27, 28, 29, 30 (e.g., 21, 22, 23 (e.g., 21)) contiguous nucleotides differing by no more than 3 (e.g., 0, 1, 2, or 3) nucleotides from the nucleotide sequence of the sense strand set forth in SEQ ID NO: 172. In some embodiments, the antisense strand consists of about 23 contiguous nucleotides differing by no more than 3 (e.g., 0, 1, 2, or 3) nucleotides from the nucleotide sequence of the antisense strand set forth in SEQ ID NO: 355; and the sense strand consists of about 21 contiguous nucleotides differing by no more than 3 (e.g., 0, 1, 2, or 3) nucleotides from the nucleotide sequence of the sense strand set forth in SEQ ID NO: 172. In some embodiments, the antisense strand consists of about 21 contiguous nucleotides differing by no more than 3 (e.g., 0, 1, 2, or 3) nucleotides from the nucleotide sequence of the antisense strand set forth in SEQ ID NO: 355; and the sense strand consists of about 19 contiguous nucleotides differing by no more than 3 (e.g., 0, 1, 2, or 3) nucleotides from the nucleotide sequence of the sense strand set forth in SEQ ID NO: 172.

[0505] In some embodiments, the nucleotide sequence of the antisense strand consists of the nucleotide sequence of the antisense strand set forth in SEQ ID NO: 355 differing by no more than 3 (e.g., 0, 1, 2, or 3) nucleotides from the nucleotide sequence of the antisense strand set forth in SEQ ID NO: 355; and the nucleotide sequence of the sense strand consists of the nucleotide sequence of the sense strand set forth in SEQ ID NO: 172 differing by no more than 3 (e.g., 0, 1, 2, or 3) nucleotides from the sense strand set forth in SEQ ID NO: 172.

[0506] In some embodiments, the nucleotide sequence of the antisense strand consists of the nucleotide sequence of antisense strand set forth in SEQ ID NO: 355; and the nucleotide sequence of the sense strand consists of the nucleotide sequence of the sense strand set forth in SEQ ID NO: 172.

[0507] In some embodiments, the nucleotide sequence of the antisense strand differs by no more than 5 (e.g., 0, 1, 2, 3, 4, or 5) nucleotides from the nucleotide sequence set forth in SEQ ID NO: 315; and the nucleotide sequence of the sense strand differs by no more than 5 (e.g., 0, 1, 2, 3, 4, or 5) nucleotides from the nucleotide sequence set forth in SEQ ID NO: 132. In some embodiments, the nucleotide sequence of the antisense strand differs by no more than 3 (e.g., 0, 1, 2, or 3) nucleotides from the nucleotide sequence set forth in SEQ ID NO: 315; and the nucleotide sequence of the sense strand differs by no more than 3 (e.g., 0, 1, 2, or 3) nucleotides from the nucleotide sequence set forth in SEQ ID NO: 132. In some embodiments, the nucleotide sequence of the antisense strand differs by no more than 2 (e.g., 0, 1, or 2) nucleotides from the nucleotide sequence set forth in SEQ ID NO: 315; and the nucleotide sequence of the sense strand differs by no more than 2 (e.g., 0, 1, or 2) nucleotides from the nucleotide sequence set forth in SEQ ID NO: 132. In some embodiments, the nucleotide sequence of the antisense strand differs by no more than 1 (e.g., 0 or 1) nucleotide from the nucleotide sequence set forth in SEQ ID NO: 315; and the nucleotide sequence of the sense strand differs by no more than 1 (e.g., 0 or 1) nucleotide from the nucleotide sequence set forth in SEQ ID NO: 132.

[0508] In some embodiments, the nucleotide sequence of the antisense strand comprises the nucleotide sequence set forth in SEQ ID NO: 315 differing by no more than 5 (e.g., 0, 1, 2, 3, 4, or 5) nucleotides from the nucleotide sequence set forth in SEQ ID NO: 315; and the nucleotide sequence of the sense strand comprises the nucleotide sequence set forth in SEQ ID NO: 315 differing by no more than 5 (e.g., 0, 1, 2, 3, 4, or 5) nucleotides from the nucleotide sequence set forth in SEQ ID NO: 132. In some embodiments, the nucleotide sequence of the antisense strand comprises the nucleotide sequence set forth in SEQ ID NO: 315 differing by no more than 3 (e.g., 0, 1, 2, or 3) nucleotides from the nucleotide sequence set forth in SEQ ID NO: 315; and the nucleotide sequence of the sense strand comprises the nucleotide sequence set forth in SEQ ID NO: 132 differing by no more than 3 (e.g., 0, 1, 2, or 3) nucleotides from the nucleotide sequence set forth in SEQ ID NO: 132. In some embodiments, the nucleotide sequence of the antisense strand comprises the nucleotide sequence set forth in SEQ ID NO: 315 differing by no more than 2 (e.g., 0, 1, or 2) nucleotides from the nucleotide sequence set forth in SEQ ID NO: 315; and the nucleotide sequence of the sense strand comprises the nucleotide sequence set forth in SEQ ID NO: 132 differing by no more than 2 (e.g., 0, 1, or 2) nucleotides from the nucleotide sequence set forth in SEQ ID NO: 132. In some embodiments, the nucleotide sequence of the antisense strand comprises the nucleotide sequence set forth in SEQ ID NO: 315 differing by no more than 1 (e.g., 0 or 1) nucleotide from nucleotide sequence set forth in SEQ ID NO: 315; and the nucleotide sequence of the sense strand comprises the nucleotide sequence set forth in SEQ ID NO: 132 differing by no more than 1 (e.g., 0 or 1) nucleotide from nucleotide sequence set forth in SEQ ID NO: 132.

[0509] In some embodiments, the nucleotide sequence of the antisense strand is at least 85%, 86%, 87%, 88%, 89%, 90%, 91%, 92%, 93%, 94%, 95%, 96%, 97%, 98%, 99% or 100% identical to the nucleotide sequence set forth in SEQ ID NO: 315; and the nucleotide sequence of the sense strand is at least 85%, 86%, 87%, 88%, 89%, 90%, 91%, 92%, 93%, 94%, 95%, 96%, 97%, 98%, 99% or 100% identical to the nucleotide sequence set forth in SEQ ID NO: 132. In some embodiments, the nucleotide sequence of the antisense strand is at least 90%, 91%, 92%, 93%, 94%, 95%, 96%, 97%, 98%, 99% or 100% identical to the nucleotide sequence set forth in SEQ ID NO: 315; and the nucleotide sequence of the sense strand is at least 90%, 91%, 92%, 93%, 94%, 95%, 96%, 97%, 98%, 99% or 100% identical to the nucleotide sequence set forth in SEQ ID NO: 132. In some embodiments, the nucleotide sequence of the antisense strand is at least 95%, 96%, 97%, 98%, 99% or 100% identical to the nucleotide sequence set forth in SEQ ID NO: 315; and the nucleotide sequence of the sense strand is at least 95%, 96%, 97%, 98%, 99% or 100% identical to the nucleotide sequence set forth in SEQ ID NO: 132. In some embodiments, the nucleotide sequence of the antisense strand is at least 96%, 97%, 98%, 99% or 100% identical to the nucleotide sequence set forth in SEQ ID NO: 315; and the nucleotide sequence of the sense strand is at least 96%, 97%, 98%, 99% or 100% identical to the nucleotide sequence set forth in SEQ ID NO: 132. In some embodiments, the nucleotide sequence of the antisense strand is at least 97%, identical to the nucleotide sequence set forth in SEQ ID NO: 315; and the nucleotide sequence of the sense strand is at least 97%, identical to the nucleotide sequence set forth in SEQ ID NO: 132. In some embodiments, the nucleotide sequence of the antisense strand is at least 98% identical to the nucleotide sequence set forth in SEQ ID NO: 315; and the nucleotide sequence of the sense strand is at least 98% identical to the nucleotide sequence set forth in SEQ ID NO: 132. In some embodiments, the nucleotide sequence of the antisense strand is at least 99% identical to the nucleotide sequence set forth in SEQ ID NO: 315; and the nucleotide sequence of the sense strand is at least 99% identical to the nucleotide sequence set forth in SEQ ID NO: 132. In some embodiments, the nucleotide sequence of the antisense strand is 100% identical to the nucleotide sequence set forth in SEQ ID NO: 315; and the nucleotide sequence of the sense strand is 100% identical to the nucleotide sequence set forth in SEQ ID NO: 132.

[0510] In some embodiments, the nucleotide sequence of the antisense strand comprises the nucleotide sequence set forth in SEQ ID NO: 315; and the nucleotide sequence of the sense strand comprises the nucleotide sequence set forth in SEQ ID NO: 132. In some embodiments, the nucleotide sequence of the antisense strand consists of the nucleotide sequence set forth in SEQ ID NO: 315; and the nucleotide sequence of the sense strand consists of the nucleotide sequence set forth in SEQ ID NO: 132.

[0511] In some embodiments, the antisense strand comprises at least 15 (e.g., 15, 16, 17, 18, 19, 20, 21, 22, 23, 24, 25, 26, 27, 28, 29, 30 (e.g., 19, 20, 21, 22, 23 (e.g., 23))) contiguous nucleotides differing by no more than 3 (e.g., 0, 1, 2, or 3) nucleotides from the nucleotide sequence of the antisense strand set forth in SEQ ID NO: 315; and the sense strand comprises at least 15 (e.g., 15, 16, 17, 18, 19, 20, 21, 22, 23, 24, 25, 26, 27, 28, 29, 30 (e.g., 19, 20, 21, 22, 23 (e.g., 21))) contiguous nucleotides differing by no more than 3 (e.g., 0, 1, 2, or 3) nucleotides from the nucleotide sequence of the sense strand set forth in SEQ ID NO: 132. In some embodiments, the antisense strand comprises at least 19 (e.g., 20, 21, 22, 23, 24, 25, 26, 27, 28, 29, 30 (e.g., 19, 20, 21, 22, 23 (e.g., 23))) contiguous nucleotides differing by no more than 3 (e.g., 0, 1, 2, or 3) nucleotides from the nucleotide sequence of the antisense strand set forth in SEQ ID NO: 315; and the sense strand comprises at least 19 (e.g., 20, 21, 22, 23, 24, 25, 26, 27, 28, 29, 30 (e.g., 19, 20, 21, 22, 23 (e.g., 21))) contiguous nucleotides differing by no more than 3 (e.g., 0, 1, 2, or 3) nucleotides from the nucleotide sequence of the sense strand set forth in SEQ ID NO: 132. In some embodiments, the antisense strand comprises at least 21 (e.g., 22, 23, 24, 25, 26, 27, 28, 29, 30 (e.g., 21, 22, 23 (e.g., 23))) contiguous nucleotides differing by no more than 3 (e.g., 0, 1, 2, or 3) nucleotides from the nucleotide sequence of the antisense strand set forth in SEQ ID NO: 315; and the sense strand comprises at least 19 (e.g., 20, 21, 22, 23, 24, 25, 26, 27, 28, 29, 30 (e.g., 19, 20, 21, 22, 23 (e.g., 21))) contiguous nucleotides differing by no more than 3 (e.g., 0, 1, 2, or 3) nucleotides from the nucleotide sequence of the sense strand set forth in SEQ ID NO: 132. In some embodiments, the antisense strand comprises at least 21 (e.g., 22, 23, 24, 25, 26, 27, 28, 29, 30 (e.g., 21, 22, 23 (e.g., 23))) contiguous nucleotides differing by no more than 3 (e.g., 0, 1, 2, or 3) nucleotides from the nucleotide sequence of the antisense strand set forth in SEQ ID NO: 315; and the sense strand comprises at least 21 (e.g., 22, 23, 24, 25, 26, 27, 28, 29, 30 (e.g., 21, 22, 23 (e.g., 21))) contiguous nucleotides differing by no more than 3 (e.g., 0, 1, 2, or 3) nucleotides from the nucleotide sequence of the sense strand set forth in SEQ ID NO: 132. In some embodiments, the antisense strand comprises at least 23 (e.g., 24, 25, 26, 27, 28, 29, 30 (e.g., 23)) contiguous nucleotides differing by no more than 3 (e.g., 0, 1, 2, or 3) nucleotides from the nucleotide sequence of the antisense strand set forth in SEQ ID NO: 315; and the sense strand comprises at least 21 (e.g., 22, 23, 24, 25, 26, 27, 28, 29, 30 (e.g., 21, 22, 23 (e.g., 21))) contiguous nucleotides differing by no more than 3 (e.g., 0, 1, 2, or 3) nucleotides from the nucleotide sequence of the sense strand set forth in SEQ ID NO: 132.

[0512] In some embodiments, the antisense strand comprises from about 15-23 (e.g., 15-22, 15-21, 15-20, 15-19, 15-18, 15-17, 15-16, 16-22, 16-20, 16-19, 16-18, 16-17, 17-23, 17-22, 17-21, 17-20, 17-19, 17-18, 18-23, 18-22, 18-21, 18-20, 18-19, 19-23, 19-22, 19-21, 19-20, 20-23, 20-22, 20-21, 21-23, 21-22, 22-23) contiguous nucleotides differing by no more than 3 (e.g., 0, 1, 2, or 3) nucleotides from the nucleotide sequence of the antisense strand set forth in SEQ ID NO: 315; and the sense strand comprises from about 15-23 (e.g., 15-22, 15-21, 15-20, 15-19, 15-18, 15-17, 15-16, 16-22, 16-20, 16-19, 16-18, 16-17, 17-23, 17-22, 17-21, 17-20, 17-19, 17-18, 18-23, 18-22, 18-21, 18-20, 18-19, 19-23, 19-22, 19-21, 19-20, 20-23, 20-22, 20-21, 21-23, 21-22, 22-23) contiguous nucleotides differing by no more than 3 (e.g., 0, 1, 2, or 3) nucleotides from the nucleotide sequence of the sense strand set forth in SEQ ID NO: 132. In some embodiments, the antisense strand comprises from about 19-23 (e.g., 19-22, 19-21, 19-20, 20-23, 20-22, 20-21, 21-23, 21-22, 22-23) contiguous nucleotides differing by no more than 3 (e.g., 0, 1, 2, or 3) nucleotides from the nucleotide sequence of the antisense strand set forth in SEQ ID NO: 315; and the sense strand comprises from about 19-23 (e.g., 19-22, 19-21, 19-20, 20-23, 20-22, 20-21, 21-23, 21-22, 22-23) contiguous nucleotides differing by no more than 3 (e.g., 0, 1, 2, or 3) nucleotides from the nucleotide sequence of the sense strand set forth in SEQ ID NO: 132. In some embodiments, the antisense strand comprises from about from about 21-23 (e.g., 21-22, 22-23) contiguous nucleotides differing by no more than 3 (e.g., 0, 1, 2, or 3) nucleotides from the nucleotide sequence of the antisense strand set forth in SEQ ID NO: 315; and the sense strand comprises from about 19-23 (e.g., 19-22, 19-21, 19-20, 20-23, 20-22, 20-21, 21-23, 21-22, 22-23) contiguous nucleotides differing by no more than 3 (e.g., 0, 1, 2, or 3) nucleotides from the nucleotide sequence of the sense strand set forth in SEQ ID NO: 132. In some embodiments, the antisense strand comprises from about 21-23 (e.g., 21-22, 22-23) contiguous nucleotides differing by no more than 3 (e.g., 0, 1, 2, or 3) nucleotides from the nucleotide sequence of the antisense strand set forth in SEQ ID NO: 315; and the sense strand comprises from about 21-23 (e.g., 21-22, 22-23) contiguous nucleotides differing by no more than 3 (e.g., 0, 1, 2, or 3) nucleotides from the nucleotide sequence of the sense strand set forth in SEQ ID NO: 132.

[0513] In some embodiments, the antisense strand comprises about 15, 16, 17, 18, 19, 20, 21, 22, 23, 24, 25, 26, 27, 28, 29, or 30 (e.g., 19, 20, 21, 22, 23 (e.g., 23)) contiguous nucleotides differing by no more than 3 (e.g., 0, 1, 2, or 3) nucleotides from the nucleotide sequence of the antisense strand set forth in SEQ ID NO: 315; and the sense strand comprises about 15, 16, 17, 18, 19, 20, 21, 22, 23, 24, 25, 26, 27, 28, 29, or 30 (e.g., 19, 20, 21, 22, 23 (e.g., 21)) contiguous nucleotides differing by no more than 3 (e.g., 0, 1, 2, or 3) nucleotides from the nucleotide sequence of the sense strand set forth in SEQ ID NO: 132. In some embodiments, the antisense strand comprises about 19, 20, 21, 22, 23, 24, 25, 26, 27, 28, 29, 30 (e.g., 19, 20, 21, 22, 23 (e.g., 23)) contiguous nucleotides differing by no more than 3 (e.g., 0, 1, 2, or 3) nucleotides from the nucleotide sequence of the antisense strand set forth in SEQ ID NO: 315; and the sense strand comprises 19, 20, 21, 22, 23, 24, 25, 26, 27, 28, 29, 30 (e.g., 19, 20, 21, 22, 23 (e.g., 21)) contiguous nucleotides differing by no more than 3 (e.g., 0, 1, 2, or 3) nucleotides from the nucleotide sequence of the sense strand set forth in SEQ ID NO: 132. In some embodiments, the antisense strand comprises about 21, 22, 23, 24, 25, 26, 27, 28, 29, 30 (e.g., 21, 22, 23 (e.g., 23)) contiguous nucleotides differing by no more than 3 (e.g., 0, 1, 2, or 3) nucleotides from the nucleotide sequence of the antisense strand set forth in SEQ ID NO: 315; and the sense strand about 19, 20, 21, 22, 23, 24, 25, 26, 27, 28, 29, 30 (e.g., 19, 20, 21, 22, 23 (e.g., 21)) contiguous nucleotides differing by no more than 3 (e.g., 0, 1, 2, or 3) nucleotides from the nucleotide sequence of the sense strand set forth in SEQ ID NO: 132. In some embodiments, the antisense strand comprises about 21, 22, 23, 24, 25, 26, 27, 28, 29, 30 (e.g., 21, 22, 23 (e.g., 23)) contiguous nucleotides differing by no more than 3 (e.g., 0, 1, 2, or 3) nucleotides from the nucleotide sequence of the antisense strand set forth in SEQ ID NO: 315; and the sense strand comprises about 21, 22, 23, 24, 25, 26, 27, 28, 29, 30 (e.g., 21, 22, 23 (e.g., 21)) contiguous nucleotides differing by no more than 3 (e.g., 0, 1, 2, or 3) nucleotides from the nucleotide sequence of the sense strand set forth in SEQ ID NO: 132. In some embodiments, the antisense strand comprises about 23, 24, 25, 26, 27, 28, 29, 30 (e.g., 23) contiguous nucleotides differing by no more than 3 (e.g., 0, 1, 2, or 3) nucleotides from the nucleotide sequence of the antisense strand set forth in SEQ ID NO: 315; and the sense strand comprises about 21, 22, 23, 24, 25, 26, 27, 28, 29, 30 (e.g., 21, 22, 23 (e.g., 21)) contiguous nucleotides differing by no more than 3 (e.g., 0, 1, 2, or 3) nucleotides from the nucleotide sequence of the sense strand set forth in SEQ ID NO: 132. In some embodiments, the antisense strand comprises about 23 contiguous nucleotides differing by no more than 3 (e.g., 0, 1, 2, or 3) nucleotides from the nucleotide sequence of the antisense strand set forth in SEQ ID NO: 315; and the sense strand comprises about 21 contiguous nucleotides differing by no more than 3 (e.g., 0, 1, 2, or 3) nucleotides from the nucleotide sequence of the sense strand set forth in SEQ ID NO: 132. In some embodiments, the antisense strand comprises about 21 contiguous nucleotides differing by no more than 3 (e.g., 0, 1, 2, or 3) nucleotides from the nucleotide sequence of the antisense strand set forth in SEQ ID NO: 315; and the sense strand comprises about 19 contiguous nucleotides differing by no more than 3 (e.g., 0, 1, 2, or 3) nucleotides from the nucleotide sequence of the sense strand set forth in SEQ ID NO: 132.

[0514] In some embodiments, the nucleotide sequence of the antisense strand comprises the nucleotide sequence of the antisense strand set forth in SEQ ID NO: 315 differing by no more than 3 (e.g., 0, 1, 2, or 3) nucleotides from the nucleotide sequence of the antisense strand set forth in SEQ ID NO: 315; and the nucleotide sequence of the sense strand comprises the nucleotide sequence of the sense strand set forth in SEQ ID NO: 132 differing by no more than 3 (e.g., 0, 1, 2, or 3) nucleotides from the sense strand set forth in SEQ ID NO: 132.

[0515] In some embodiments, the nucleotide sequence of the antisense strand comprises the nucleotide sequence of antisense strand set forth in SEQ ID NO: 315; and the nucleotide sequence of the sense strand comprises the nucleotide sequence of the sense strand set forth in SEQ ID NO: 132.

[0516] In some embodiments, the antisense strand consists of about 15, 16, 17, 18, 19, 20, 21, 22, 23, 24, 25, 26, 27, 28, 29, or 30 (e.g., 19, 20, 21, 22, 23 (e.g., 23)) contiguous nucleotides differing by no more than 3 (e.g., 0, 1, 2, or 3) nucleotides from the nucleotide sequence of the antisense strand set forth in SEQ ID NO: 315; and the sense strand consists of about 15, 16, 17, 18, 19, 20, 21, 22, 23, 24, 25, 26, 27, 28, 29, or 30 (e.g., 19, 20, 21, 22, 23 (e.g., 21)) contiguous nucleotides differing by no more than 3 (e.g., 0, 1, 2, or 3) nucleotides from the nucleotide sequence of the sense strand set forth in SEQ ID NO: 132. In some embodiments, the antisense strand consists of about 19, 20, 21, 22, 23, 24, 25, 26, 27, 28, 29, 30 (e.g., 19, 20, 21, 22, 23 (e.g., 23)) contiguous nucleotides differing by no more than 3 (e.g., 0, 1, 2, or 3) nucleotides from the nucleotide sequence of the antisense strand set forth in SEQ ID NO: 315; and the sense strand consists of 19, 20, 21, 22, 23, 24, 25, 26, 27, 28, 29, 30 (e.g., 19, 20, 21, 22, 23 (e.g., 21)) contiguous nucleotides differing by no more than 3 (e.g., 0, 1, 2, or 3) nucleotides from the nucleotide sequence of the sense strand set forth in SEQ ID NO: 132. In some embodiments, the antisense strand consists of about 21, 22, 23, 24, 25, 26, 27, 28, 29, 30 (e.g., 21, 22, 23 (e.g., 23)) contiguous nucleotides differing by no more than 3 (e.g., 0, 1, 2, or 3) nucleotides from the nucleotide sequence of the antisense strand set forth in SEQ ID NO: 315; and the sense strand consists of about 19, 20, 21, 22, 23, 24, 25, 26, 27, 28, 29, 30 (e.g., 19, 20, 21, 22, 23 (e.g., 21)) contiguous nucleotides differing by no more than 3 (e.g., 0, 1, 2, or 3) nucleotides from the nucleotide sequence of the sense strand set forth in SEQ ID NO: 132. In some embodiments, the antisense strand consists of about 21, 22, 23, 24, 25, 26, 27, 28, 29, 30 (e.g., 21, 22, 23 (e.g., 23)) contiguous nucleotides differing by no more than 3 (e.g., 0, 1, 2, or 3) nucleotides from the nucleotide sequence of the antisense strand set forth in SEQ ID NO: 315; and the sense strand consists of at about 21, 22, 23, 24, 25, 26, 27, 28, 29, 30 (e.g., 21, 22, 23 (e.g., 21)) contiguous nucleotides differing by no more than 3 (e.g., 0, 1, 2, or 3) nucleotides from the nucleotide sequence of the sense strand set forth in SEQ ID NO: 132. In some embodiments, the antisense strand consists of about 23, 24, 25, 26, 27, 28, 29, 30 (e.g., 23) contiguous nucleotides differing by no more than 3 (e.g., 0, 1, 2, or 3) nucleotides from the nucleotide sequence of the antisense strand set forth in SEQ ID NO: 315; and the sense strand consists of about 21, 22, 23, 24, 25, 26, 27, 28, 29, 30 (e.g., 21, 22, 23 (e.g., 21)) contiguous nucleotides differing by no more than 3 (e.g., 0, 1, 2, or 3) nucleotides from the nucleotide sequence of the sense strand set forth in SEQ ID NO: 132. In some embodiments, the antisense strand consists of about 23 contiguous nucleotides differing by no more than 3 (e.g., 0, 1, 2, or 3) nucleotides from the nucleotide sequence of the antisense strand set forth in SEQ ID NO: 315; and the sense strand consists of about 21 contiguous nucleotides differing by no more than 3 (e.g., 0, 1, 2, or 3) nucleotides from the nucleotide sequence of the sense strand set forth in SEQ ID NO: 132. In some embodiments, the antisense strand consists of about 21 contiguous nucleotides differing by no more than 3 (e.g., 0, 1, 2, or 3) nucleotides from the nucleotide sequence of the antisense strand set forth in SEQ ID NO: 315; and the sense strand consists of about 19 contiguous nucleotides differing by no more than 3 (e.g., 0, 1, 2, or 3) nucleotides from the nucleotide sequence of the sense strand set forth in SEQ ID NO: 132.

[0517] In some embodiments, the nucleotide sequence of the antisense strand consists of the nucleotide sequence of the antisense strand set forth in SEQ ID NO: 315 differing by no more than 3 (e.g., 0, 1, 2, or 3) nucleotides from the nucleotide sequence of the antisense strand set forth in SEQ ID NO: 315; and the nucleotide sequence of the sense strand consists of the nucleotide sequence of the sense strand set forth in SEQ ID NO: 132 differing by no more than 3 (e.g., 0, 1, 2, or 3) nucleotides from the sense strand set forth in SEQ ID NO: 132.

[0518] In some embodiments, the nucleotide sequence of the antisense strand consists of the nucleotide sequence of antisense strand set forth in SEQ ID NO: 315; and the nucleotide sequence of the sense strand consists of the nucleotide sequence of the sense strand set forth in SEQ ID NO: 132.

[0519] In some embodiments, the nucleotide sequence of the antisense strand differs by no more than 5 (e.g., 0, 1, 2, 3, 4, or 5) nucleotides from the nucleotide sequence set forth in SEQ ID NO: 356; and the nucleotide sequence of the sense strand differs by no more than 5 (e.g., 0, 1, 2, 3, 4, or 5) nucleotides from the nucleotide sequence set forth in SEQ ID NO: 173. In some embodiments, the nucleotide sequence of the antisense strand differs by no more than 3 (e.g., 0, 1, 2, or 3) nucleotides from the nucleotide sequence set forth in SEQ ID NO: 356; and the nucleotide sequence of the sense strand differs by no more than 3 (e.g., 0, 1, 2, or 3) nucleotides from the nucleotide sequence set forth in SEQ ID NO: 173. In some embodiments, the nucleotide sequence of the antisense strand differs by no more than 2 (e.g., 0, 1, or 2) nucleotides from the nucleotide sequence set forth in SEQ ID NO: 356; and the nucleotide sequence of the sense strand differs by no more than 2 (e.g., 0, 1, or 2) nucleotides from the nucleotide sequence set forth in SEQ ID NO: 173. In some embodiments, the nucleotide sequence of the antisense strand differs by no more than 1 (e.g., 0 or 1) nucleotide from the nucleotide sequence set forth in SEQ ID NO: 356; and the nucleotide sequence of the sense strand differs by no more than 1 (e.g., 0 or 1) nucleotide from the nucleotide sequence set forth in SEQ ID NO: 173.

[0520] In some embodiments, the nucleotide sequence of the antisense strand comprises the nucleotide sequence set forth in SEQ ID NO: 356 differing by no more than 5 (e.g., 0, 1, 2, 3, 4, or 5) nucleotides from the nucleotide sequence set forth in SEQ ID NO: 356; and the nucleotide sequence of the sense strand comprises the nucleotide sequence set forth in SEQ ID NO: 356 differing by no more than 5 (e.g., 0, 1, 2, 3, 4, or 5) nucleotides from the nucleotide sequence set forth in SEQ ID NO: 173. In some embodiments, the nucleotide sequence of the antisense strand comprises the nucleotide sequence set forth in SEQ ID NO: 356 differing by no more than 3 (e.g., 0, 1, 2, or 3) nucleotides from the nucleotide sequence set forth in SEQ ID NO: 356; and the nucleotide sequence of the sense strand comprises the nucleotide sequence set forth in SEQ ID NO: 173 differing by no more than 3 (e.g., 0, 1, 2, or 3) nucleotides from the nucleotide sequence set forth in SEQ ID NO: 173. In some embodiments, the nucleotide sequence of the antisense strand comprises the nucleotide sequence set forth in SEQ ID NO: 356 differing by no more than 2 (e.g., 0, 1, or 2) nucleotides from the nucleotide sequence set forth in SEQ ID NO: 356; and the nucleotide sequence of the sense strand comprises the nucleotide sequence set forth in SEQ ID NO: 173 differing by no more than 2 (e.g., 0, 1, or 2) nucleotides from the nucleotide sequence set forth in SEQ ID NO: 173. In some embodiments, the nucleotide sequence of the antisense strand comprises the nucleotide sequence set forth in SEQ ID NO: 356 differing by no more than 1 (e.g., 0 or 1) nucleotide from nucleotide sequence set forth in SEQ ID NO: 356; and the nucleotide sequence of the sense strand comprises the nucleotide sequence set forth in SEQ ID NO: 173 differing by no more than 1 (e.g., 0 or 1) nucleotide from nucleotide sequence set forth in SEQ ID NO: 173.

[0521] In some embodiments, the nucleotide sequence of the antisense strand is at least 85%, 86%, 87%, 88%, 89%, 90%, 91%, 92%, 93%, 94%, 95%, 96%, 97%, 98%, 99% or 100% identical to the nucleotide sequence set forth in SEQ ID NO: 356; and the nucleotide sequence of the sense strand is at least 85%, 86%, 87%, 88%, 89%, 90%, 91%, 92%, 93%, 94%, 95%, 96%, 97%, 98%, 99% or 100% identical to the nucleotide sequence set forth in SEQ ID NO: 173. In some embodiments, the nucleotide sequence of the antisense strand is at least 90%, 91%, 92%, 93%, 94%, 95%, 96%, 97%, 98%, 99% or 100% identical to the nucleotide sequence set forth in SEQ ID NO: 356; and the nucleotide sequence of the sense strand is at least 90%, 91%, 92%, 93%, 94%, 95%, 96%, 97%, 98%, 99% or 100% identical to the nucleotide sequence set forth in SEQ ID NO: 173. In some embodiments, the nucleotide sequence of the antisense strand is at least 95%, 96%, 97%, 98%, 99% or 100% identical to the nucleotide sequence set forth in SEQ ID NO: 356; and the nucleotide sequence of the sense strand is at least 95%, 96%, 97%, 98%, 99% or 100% identical to the nucleotide sequence set forth in SEQ ID NO: 173. In some embodiments, the nucleotide sequence of the antisense strand is at least 96%, 97%, 98%, 99% or 100% identical to the nucleotide sequence set forth in SEQ ID NO: 356; and the nucleotide sequence of the sense strand is at least 96%, 97%, 98%, 99% or 100% identical to the nucleotide sequence set forth in SEQ ID NO: 173. In some embodiments, the nucleotide sequence of the antisense strand is at least 97%, identical to the nucleotide sequence set forth in SEQ ID NO: 356; and the nucleotide sequence of the sense strand is at least 97%, identical to the nucleotide sequence set forth in SEQ ID NO: 173. In some embodiments, the nucleotide sequence of the antisense strand is at least 98% identical to the nucleotide sequence set forth in SEQ ID NO: 356; and the nucleotide sequence of the sense strand is at least 98% identical to the nucleotide sequence set forth in SEQ ID NO: 173. In some embodiments, the nucleotide sequence of the antisense strand is at least 99% identical to the nucleotide sequence set forth in SEQ ID NO: 356; and the nucleotide sequence of the sense strand is at least 99% identical to the nucleotide sequence set forth in SEQ ID NO: 173. In some embodiments, the nucleotide sequence of the antisense strand is 100% identical to the nucleotide sequence set forth in SEQ ID NO: 356; and the nucleotide sequence of the sense strand is 100% identical to the nucleotide sequence set forth in SEQ ID NO: 173.

[0522] In some embodiments, the nucleotide sequence of the antisense strand comprises the nucleotide sequence set forth in SEQ ID NO: 356; and the nucleotide sequence of the sense strand comprises the nucleotide sequence set forth in SEQ ID NO: 173. In some embodiments, the nucleotide sequence of the antisense strand consists of the nucleotide sequence set forth in SEQ ID NO: 356; and the nucleotide sequence of the sense strand consists of the nucleotide sequence set forth in SEQ ID NO: 173.

[0523] In some embodiments, the antisense strand comprises at least 15 (e.g., 15, 16, 17, 18, 19, 20, 21, 22, 23, 24, 25, 26, 27, 28, 29, 30 (e.g., 19, 20, 21, 22, 23 (e.g., 23))) contiguous nucleotides differing by no more than 3 (e.g., 0, 1, 2, or 3) nucleotides from the nucleotide sequence of the antisense strand set forth in SEQ ID NO: 356; and the sense strand comprises at least 15 (e.g., 15, 16, 17, 18, 19, 20, 21, 22, 23, 24, 25, 26, 27, 28, 29, 30 (e.g., 19, 20, 21, 22, 23 (e.g., 21))) contiguous nucleotides differing by no more than 3 (e.g., 0, 1, 2, or 3) nucleotides from the nucleotide sequence of the sense strand set forth in SEQ ID NO: 173. In some embodiments, the antisense strand comprises at least 19 (e.g., 20, 21, 22, 23, 24, 25, 26, 27, 28, 29, 30 (e.g., 19, 20, 21, 22, 23 (e.g., 23))) contiguous nucleotides differing by no more than 3 (e.g., 0, 1, 2, or 3) nucleotides from the nucleotide sequence of the antisense strand set forth in SEQ ID NO: 356; and the sense strand comprises at least 19 (e.g., 20, 21, 22, 23, 24, 25, 26, 27, 28, 29, 30 (e.g., 19, 20, 21, 22, 23 (e.g., 21))) contiguous nucleotides differing by no more than 3 (e.g., 0, 1, 2, or 3) nucleotides from the nucleotide sequence of the sense strand set forth in SEQ ID NO: 173. In some embodiments, the antisense strand comprises at least 21 (e.g., 22, 23, 24, 25, 26, 27, 28, 29, 30 (e.g., 21, 22, 23 (e.g., 23))) contiguous nucleotides differing by no more than 3 (e.g., 0, 1, 2, or 3) nucleotides from the nucleotide sequence of the antisense strand set forth in SEQ ID NO: 356; and the sense strand comprises at least 19 (e.g., 20, 21, 22, 23, 24, 25, 26, 27, 28, 29, 30 (e.g., 19, 20, 21, 22, 23 (e.g., 21))) contiguous nucleotides differing by no more than 3 (e.g., 0, 1, 2, or 3) nucleotides from the nucleotide sequence of the sense strand set forth in SEQ ID NO: 173. In some embodiments, the antisense strand comprises at least 21 (e.g., 22, 23, 24, 25, 26, 27, 28, 29, 30 (e.g., 21, 22, 23 (e.g., 23))) contiguous nucleotides differing by no more than 3 (e.g., 0, 1, 2, or 3) nucleotides from the nucleotide sequence of the antisense strand set forth in SEQ ID NO: 356; and the sense strand comprises at least 21 (e.g., 22, 23, 24, 25, 26, 27, 28, 29, 30 (e.g., 21, 22, 23 (e.g., 21))) contiguous nucleotides differing by no more than 3 (e.g., 0, 1, 2, or 3) nucleotides from the nucleotide sequence of the sense strand set forth in SEQ ID NO: 173. In some embodiments, the antisense strand comprises at least 23 (e.g., 24, 25, 26, 27, 28, 29, 30 (e.g., 23)) contiguous nucleotides differing by no more than 3 (e.g., 0, 1, 2, or 3) nucleotides from the nucleotide sequence of the antisense strand set forth in SEQ ID NO: 356; and the sense strand comprises at least 21 (e.g., 22, 23, 24, 25, 26, 27, 28, 29, 30 (e.g., 21, 22, 23 (e.g., 21))) contiguous nucleotides differing by no more than 3 (e.g., 0, 1, 2, or 3) nucleotides from the nucleotide sequence of the sense strand set forth in SEQ ID NO: 173.

[0524] In some embodiments, the antisense strand comprises from about 15-23 (e.g., 15-22, 15-21, 15-20, 15-19, 15-18, 15-17, 15-16, 16-22, 16-20, 16-19, 16-18, 16-17, 17-23, 17-22, 17-21, 17-20, 17-19, 17-18, 18-23, 18-22, 18-21, 18-20, 18-19, 19-23, 19-22, 19-21, 19-20, 20-23, 20-22, 20-21, 21-23, 21-22, 22-23) contiguous nucleotides differing by no more than 3 (e.g., 0, 1, 2, or 3) nucleotides from the nucleotide sequence of the antisense strand set forth in SEQ ID NO: 356; and the sense strand comprises from about 15-23 (e.g., 15-22, 15-21, 15-20, 15-19, 15-18, 15-17, 15-16, 16-22, 16-20, 16-19, 16-18, 16-17, 17-23, 17-22, 17-21, 17-20, 17-19, 17-18, 18-23, 18-22, 18-21, 18-20, 18-19, 19-23, 19-22, 19-21, 19-20, 20-23, 20-22, 20-21, 21-23, 21-22, 22-23) contiguous nucleotides differing by no more than 3 (e.g., 0, 1, 2, or 3) nucleotides from the nucleotide sequence of the sense strand set forth in SEQ ID NO: 173. In some embodiments, the antisense strand comprises from about 19-23 (e.g., 19-22, 19-21, 19-20, 20-23, 20-22, 20-21, 21-23, 21-22, 22-23) contiguous nucleotides differing by no more than 3 (e.g., 0, 1, 2, or 3) nucleotides from the nucleotide sequence of the antisense strand set forth in SEQ ID NO: 356; and the sense strand comprises from about 19-23 (e.g., 19-22, 19-21, 19-20, 20-23, 20-22, 20-21, 21-23, 21-22, 22-23) contiguous nucleotides differing by no more than 3 (e.g., 0, 1, 2, or 3) nucleotides from the nucleotide sequence of the sense strand set forth in SEQ ID NO: 173. In some embodiments, the antisense strand comprises from about from about 21-23 (e.g., 21-22, 22-23) contiguous nucleotides differing by no more than 3 (e.g., 0, 1, 2, or 3) nucleotides from the nucleotide sequence of the antisense strand set forth in SEQ ID NO: 356; and the sense strand comprises from about 19-23 (e.g., 19-22, 19-21, 19-20, 20-23, 20-22, 20-21, 21-23, 21-22, 22-23) contiguous nucleotides differing by no more than 3 (e.g., 0, 1, 2, or 3) nucleotides from the nucleotide sequence of the sense strand set forth in SEQ ID NO: 173. In some embodiments, the antisense strand comprises from about 21-23 (e.g., 21-22, 22-23) contiguous nucleotides differing by no more than 3 (e.g., 0, 1, 2, or 3) nucleotides from the nucleotide sequence of the antisense strand set forth in SEQ ID NO: 356; and the sense strand comprises from about 21-23 (e.g., 21-22, 22-23) contiguous nucleotides differing by no more than 3 (e.g., 0, 1, 2, or 3) nucleotides from the nucleotide sequence of the sense strand set forth in SEQ ID NO: 173.

[0525] In some embodiments, the antisense strand comprises about 15, 16, 17, 18, 19, 20, 21, 22, 23, 24, 25, 26, 27, 28, 29, or 30 (e.g., 19, 20, 21, 22, 23 (e.g., 23)) contiguous nucleotides differing by no more than 3 (e.g., 0, 1, 2, or 3) nucleotides from the nucleotide sequence of the antisense strand set forth in SEQ ID NO: 356; and the sense strand comprises about 15, 16, 17, 18, 19, 20, 21, 22, 23, 24, 25, 26, 27, 28, 29, or 30 (e.g., 19, 20, 21, 22, 23 (e.g., 21)) contiguous nucleotides differing by no more than 3 (e.g., 0, 1, 2, or 3) nucleotides from the nucleotide sequence of the sense strand set forth in SEQ ID NO: 173. In some embodiments, the antisense strand comprises about 19, 20, 21, 22, 23, 24, 25, 26, 27, 28, 29, 30 (e.g., 19, 20, 21, 22, 23 (e.g., 23)) contiguous nucleotides differing by no more than 3 (e.g., 0, 1, 2, or 3) nucleotides from the nucleotide sequence of the antisense strand set forth in SEQ ID NO: 356; and the sense strand comprises 19, 20, 21, 22, 23, 24, 25, 26, 27, 28, 29, 30 (e.g., 19, 20, 21, 22, 23 (e.g., 21)) contiguous nucleotides differing by no more than 3 (e.g., 0, 1, 2, or 3) nucleotides from the nucleotide sequence of the sense strand set forth in SEQ ID NO: 173. In some embodiments, the antisense strand comprises about 21, 22, 23, 24, 25, 26, 27, 28, 29, 30 (e.g., 21, 22, 23 (e.g., 23)) contiguous nucleotides differing by no more than 3 (e.g., 0, 1, 2, or 3) nucleotides from the nucleotide sequence of the antisense strand set forth in SEQ ID NO: 356; and the sense strand about 19, 20, 21, 22, 23, 24, 25, 26, 27, 28, 29, 30 (e.g., 19, 20, 21, 22, 23 (e.g., 21)) contiguous nucleotides differing by no more than 3 (e.g., 0, 1, 2, or 3) nucleotides from the nucleotide sequence of the sense strand set forth in SEQ ID NO: 173. In some embodiments, the antisense strand comprises about 21, 22, 23, 24, 25, 26, 27, 28, 29, 30 (e.g., 21, 22, 23 (e.g., 23)) contiguous nucleotides differing by no more than 3 (e.g., 0, 1, 2, or 3) nucleotides from the nucleotide sequence of the antisense strand set forth in SEQ ID NO: 356; and the sense strand comprises about 21, 22, 23, 24, 25, 26, 27, 28, 29, 30 (e.g., 21, 22, 23 (e.g., 21)) contiguous nucleotides differing by no more than 3 (e.g., 0, 1, 2, or 3) nucleotides from the nucleotide sequence of the sense strand set forth in SEQ ID NO: 173. In some embodiments, the antisense strand comprises about 23, 24, 25, 26, 27, 28, 29, 30 (e.g., 23) contiguous nucleotides differing by no more than 3 (e.g., 0, 1, 2, or 3) nucleotides from the nucleotide sequence of the antisense strand set forth in SEQ ID NO: 356; and the sense strand comprises about 21, 22, 23, 24, 25, 26, 27, 28, 29, 30 (e.g., 21, 22, 23 (e.g., 21)) contiguous nucleotides differing by no more than 3 (e.g., 0, 1, 2, or 3) nucleotides from the nucleotide sequence of the sense strand set forth in SEQ ID NO: 173. In some embodiments, the antisense strand comprises about 23 contiguous nucleotides differing by no more than 3 (e.g., 0, 1, 2, or 3) nucleotides from the nucleotide sequence of the antisense strand set forth in SEQ ID NO: 356; and the sense strand comprises about 21 contiguous nucleotides differing by no more than 3 (e.g., 0, 1, 2, or 3) nucleotides from the nucleotide sequence of the sense strand set forth in SEQ ID NO: 173. In some embodiments, the antisense strand comprises about 21 contiguous nucleotides differing by no more than 3 (e.g., 0, 1, 2, or 3) nucleotides from the nucleotide sequence of the antisense strand set forth in SEQ ID NO: 356; and the sense strand comprises about 19 contiguous nucleotides differing by no more than 3 (e.g., 0, 1, 2, or 3) nucleotides from the nucleotide sequence of the sense strand set forth in SEQ ID NO: 173.

[0526] In some embodiments, the nucleotide sequence of the antisense strand comprises the nucleotide sequence of the antisense strand set forth in SEQ ID NO: 356 differing by no more than 3 (e.g., 0, 1, 2, or 3) nucleotides from the nucleotide sequence of the antisense strand set forth in SEQ ID NO: 356; and the nucleotide sequence of the sense strand comprises the nucleotide sequence of the sense strand set forth in SEQ ID NO: 173 differing by no more than 3 (e.g., 0, 1, 2, or 3) nucleotides from the sense strand set forth in SEQ ID NO: 173.

[0527] In some embodiments, the nucleotide sequence of the antisense strand comprises the nucleotide sequence of antisense strand set forth in SEQ ID NO: 356; and the nucleotide sequence of the sense strand comprises the nucleotide sequence of the sense strand set forth in SEQ ID NO: 173.

[0528] In some embodiments, the antisense strand consists of about 15, 16, 17, 18, 19, 20, 21, 22, 23, 24, 25, 26, 27, 28, 29, or 30 (e.g., 19, 20, 21, 22, 23 (e.g., 23)) contiguous nucleotides differing by no more than 3 (e.g., 0, 1, 2, or 3) nucleotides from the nucleotide sequence of the antisense strand set forth in SEQ ID NO: 356; and the sense strand consists of about 15, 16, 17, 18, 19, 20, 21, 22, 23, 24, 25, 26, 27, 28, 29, or 30 (e.g., 19, 20, 21, 22, 23 (e.g., 21)) contiguous nucleotides differing by no more than 3 (e.g., 0, 1, 2, or 3) nucleotides from the nucleotide sequence of the sense strand set forth in SEQ ID NO: 173. In some embodiments, the antisense strand consists of about 19, 20, 21, 22, 23, 24, 25, 26, 27, 28, 29, 30 (e.g., 19, 20, 21, 22, 23 (e.g., 23)) contiguous nucleotides differing by no more than 3 (e.g., 0, 1, 2, or 3) nucleotides from the nucleotide sequence of the antisense strand set forth in SEQ ID NO: 356; and the sense strand consists of 19, 20, 21, 22, 23, 24, 25, 26, 27, 28, 29, 30 (e.g., 19, 20, 21, 22, 23 (e.g., 21)) contiguous nucleotides differing by no more than 3 (e.g., 0, 1, 2, or 3) nucleotides from the nucleotide sequence of the sense strand set forth in SEQ ID NO: 173. In some embodiments, the antisense strand consists of about 21, 22, 23, 24, 25, 26, 27, 28, 29, 30 (e.g., 21, 22, 23 (e.g., 23)) contiguous nucleotides differing by no more than 3 (e.g., 0, 1, 2, or 3) nucleotides from the nucleotide sequence of the antisense strand set forth in SEQ ID NO: 356; and the sense strand consists of about 19, 20, 21, 22, 23, 24, 25, 26, 27, 28, 29, 30 (e.g., 19, 20, 21, 22, 23 (e.g., 21)) contiguous nucleotides differing by no more than 3 (e.g., 0, 1, 2, or 3) nucleotides from the nucleotide sequence of the sense strand set forth in SEQ ID NO: 173. In some embodiments, the antisense strand consists of about 21, 22, 23, 24, 25, 26, 27, 28, 29, 30 (e.g., 21, 22, 23 (e.g., 23)) contiguous nucleotides differing by no more than 3 (e.g., 0, 1, 2, or 3) nucleotides from the nucleotide sequence of the antisense strand set forth in SEQ ID NO: 356; and the sense strand consists of at about 21, 22, 23, 24, 25, 26, 27, 28, 29, 30 (e.g., 21, 22, 23 (e.g., 21)) contiguous nucleotides differing by no more than 3 (e.g., 0, 1, 2, or 3) nucleotides from the nucleotide sequence of the sense strand set forth in SEQ ID NO: 173. In some embodiments, the antisense strand consists of about 23, 24, 25, 26, 27, 28, 29, 30 (e.g., 23) contiguous nucleotides differing by no more than 3 (e.g., 0, 1, 2, or 3) nucleotides from the nucleotide sequence of the antisense strand set forth in SEQ ID NO: 356; and the sense strand consists of about 21, 22, 23, 24, 25, 26, 27, 28, 29, 30 (e.g., 21, 22, 23 (e.g., 21)) contiguous nucleotides differing by no more than 3 (e.g., 0, 1, 2, or 3) nucleotides from the nucleotide sequence of the sense strand set forth in SEQ ID NO: 173. In some embodiments, the antisense strand consists of about 23 contiguous nucleotides differing by no more than 3 (e.g., 0, 1, 2, or 3) nucleotides from the nucleotide sequence of the antisense strand set forth in SEQ ID NO: 356; and the sense strand consists of about 21 contiguous nucleotides differing by no more than 3 (e.g., 0, 1, 2, or 3) nucleotides from the nucleotide sequence of the sense strand set forth in SEQ ID NO: 173. In some embodiments, the antisense strand consists of about 21 contiguous nucleotides differing by no more than 3 (e.g., 0, 1, 2, or 3) nucleotides from the nucleotide sequence of the antisense strand set forth in SEQ ID NO: 356; and the sense strand consists of about 19 contiguous nucleotides differing by no more than 3 (e.g., 0, 1, 2, or 3) nucleotides from the nucleotide sequence of the sense strand set forth in SEQ ID NO: 173.

[0529] In some embodiments, the nucleotide sequence of the antisense strand consists of the nucleotide sequence of the antisense strand set forth in SEQ ID NO: 356 differing by no more than 3 (e.g., 0, 1, 2, or 3) nucleotides from the nucleotide sequence of the antisense strand set forth in SEQ ID NO: 356; and the nucleotide sequence of the sense strand consists of the nucleotide sequence of the sense strand set forth in SEQ ID NO: 173 differing by no more than 3 (e.g., 0, 1, 2, or 3) nucleotides from the sense strand set forth in SEQ ID NO: 173.

[0530] In some embodiments, the nucleotide sequence of the antisense strand consists of the nucleotide sequence of antisense strand set forth in SEQ ID NO: 356; and the nucleotide sequence of the sense strand consists of the nucleotide sequence of the sense strand set forth in SEQ ID NO: 173.

[0531] In some embodiments, the nucleotide sequence of the antisense strand differs by no more than 5 (e.g., 0, 1, 2, 3, 4, or 5) nucleotides from the nucleotide sequence set forth in SEQ ID NO: 321; and the nucleotide sequence of the sense strand differs by no more than 5 (e.g., 0, 1, 2, 3, 4, or 5) nucleotides from the nucleotide sequence set forth in SEQ ID NO: 138. In some embodiments, the nucleotide sequence of the antisense strand differs by no more than 3 (e.g., 0, 1, 2, or 3) nucleotides from the nucleotide sequence set forth in SEQ ID NO: 321; and the nucleotide sequence of the sense strand differs by no more than 3 (e.g., 0, 1, 2, or 3) nucleotides from the nucleotide sequence set forth in SEQ ID NO: 138. In some embodiments, the nucleotide sequence of the antisense strand differs by no more than 2 (e.g., 0, 1, or 2) nucleotides from the nucleotide sequence set forth in SEQ ID NO: 321; and the nucleotide sequence of the sense strand differs by no more than 2 (e.g., 0, 1, or 2) nucleotides from the nucleotide sequence set forth in SEQ ID NO: 138. In some embodiments, the nucleotide sequence of the antisense strand differs by no more than 1 (e.g., 0 or 1) nucleotide from the nucleotide sequence set forth in SEQ ID NO: 321; and the nucleotide sequence of the sense strand differs by no more than 1 (e.g., 0 or 1) nucleotide from the nucleotide sequence set forth in SEQ ID NO: 138.

[0532] In some embodiments, the nucleotide sequence of the antisense strand comprises the nucleotide sequence set forth in SEQ ID NO: 321 differing by no more than 5 (e.g., 0, 1, 2, 3, 4, or 5) nucleotides from the nucleotide sequence set forth in SEQ ID NO: 321; and the nucleotide sequence of the sense strand comprises the nucleotide sequence set forth in SEQ ID NO: 321 differing by no more than 5 (e.g., 0, 1, 2, 3, 4, or 5) nucleotides from the nucleotide sequence set forth in SEQ ID NO: 138. In some embodiments, the nucleotide sequence of the antisense strand comprises the nucleotide sequence set forth in SEQ ID NO: 321 differing by no more than 3 (e.g., 0, 1, 2, or 3) nucleotides from the nucleotide sequence set forth in SEQ ID NO: 321; and the nucleotide sequence of the sense strand comprises the nucleotide sequence set forth in SEQ ID NO: 138 differing by no more than 3 (e.g., 0, 1, 2, or 3) nucleotides from the nucleotide sequence set forth in SEQ ID NO: 138. In some embodiments, the nucleotide sequence of the antisense strand comprises the nucleotide sequence set forth in SEQ ID NO: 321 differing by no more than 2 (e.g., 0, 1, or 2) nucleotides from the nucleotide sequence set forth in SEQ ID NO: 321; and the nucleotide sequence of the sense strand comprises the nucleotide sequence set forth in SEQ ID NO: 138 differing by no more than 2 (e.g., 0, 1, or 2) nucleotides from the nucleotide sequence set forth in SEQ ID NO: 138. In some embodiments, the nucleotide sequence of the antisense strand comprises the nucleotide sequence set forth in SEQ ID NO: 321 differing by no more than 1 (e.g., 0 or 1) nucleotide from nucleotide sequence set forth in SEQ ID NO: 321; and the nucleotide sequence of the sense strand comprises the nucleotide sequence set forth in SEQ ID NO: 138 differing by no more than 1 (e.g., 0 or 1) nucleotide from nucleotide sequence set forth in SEQ ID NO: 138.

[0533] In some embodiments, the nucleotide sequence of the antisense strand is at least 85%, 86%, 87%, 88%, 89%, 90%, 91%, 92%, 93%, 94%, 95%, 96%, 97%, 98%, 99% or 100% identical to the nucleotide sequence set forth in SEQ ID NO: 321; and the nucleotide sequence of the sense strand is at least 85%, 86%, 87%, 88%, 89%, 90%, 91%, 92%, 93%, 94%, 95%, 96%, 97%, 98%, 99% or 100% identical to the nucleotide sequence set forth in SEQ ID NO: 138. In some embodiments, the nucleotide sequence of the antisense strand is at least 90%, 91%, 92%, 93%, 94%, 95%, 96%, 97%, 98%, 99% or 100% identical to the nucleotide sequence set forth in SEQ ID NO: 321; and the nucleotide sequence of the sense strand is at least 90%, 91%, 92%, 93%, 94%, 95%, 96%, 97%, 98%, 99% or 100% identical to the nucleotide sequence set forth in SEQ ID NO: 138. In some embodiments, the nucleotide sequence of the antisense strand is at least 95%, 96%, 97%, 98%, 99% or 100% identical to the nucleotide sequence set forth in SEQ ID NO: 321; and the nucleotide sequence of the sense strand is at least 95%, 96%, 97%, 98%, 99% or 100% identical to the nucleotide sequence set forth in SEQ ID NO: 138. In some embodiments, the nucleotide sequence of the antisense strand is at least 96%, 97%, 98%, 99% or 100% identical to the nucleotide sequence set forth in SEQ ID NO: 321; and the nucleotide sequence of the sense strand is at least 96%, 97%, 98%, 99% or 100% identical to the nucleotide sequence set forth in SEQ ID NO: 138. In some embodiments, the nucleotide sequence of the antisense strand is at least 97%, identical to the nucleotide sequence set forth in SEQ ID NO: 321; and the nucleotide sequence of the sense strand is at least 97%, identical to the nucleotide sequence set forth in SEQ ID NO: 138. In some embodiments, the nucleotide sequence of the antisense strand is at least 98% identical to the nucleotide sequence set forth in SEQ ID NO: 321; and the nucleotide sequence of the sense strand is at least 98% identical to the nucleotide sequence set forth in SEQ ID NO: 138. In some embodiments, the nucleotide sequence of the antisense strand is at least 99% identical to the nucleotide sequence set forth in SEQ ID NO: 321; and the nucleotide sequence of the sense strand is at least 99% identical to the nucleotide sequence set forth in SEQ ID NO: 138. In some embodiments, the nucleotide sequence of the antisense strand is 100% identical to the nucleotide sequence set forth in SEQ ID NO: 321; and the nucleotide sequence of the sense strand is 100% identical to the nucleotide sequence set forth in SEQ ID NO: 138.

[0534] In some embodiments, the nucleotide sequence of the antisense strand comprises the nucleotide sequence set forth in SEQ ID NO: 321; and the nucleotide sequence of the sense strand comprises the nucleotide sequence set forth in SEQ ID NO: 138. In some embodiments, the nucleotide sequence of the antisense strand consists of the nucleotide sequence set forth in SEQ ID NO: 321; and the nucleotide sequence of the sense strand consists of the nucleotide sequence set forth in SEQ ID NO: 138.

[0535] In some embodiments, the antisense strand comprises at least 15 (e.g., 15, 16, 17, 18, 19, 20, 21, 22, 23, 24, 25, 26, 27, 28, 29, 30 (e.g., 19, 20, 21, 22, 23 (e.g., 23))) contiguous nucleotides differing by no more than 3 (e.g., 0, 1, 2, or 3) nucleotides from the nucleotide sequence of the antisense strand set forth in SEQ ID NO: 321; and the sense strand comprises at least 15 (e.g., 15, 16, 17, 18, 19, 20, 21, 22, 23, 24, 25, 26, 27, 28, 29, 30 (e.g., 19, 20, 21, 22, 23 (e.g., 21))) contiguous nucleotides differing by no more than 3 (e.g., 0, 1, 2, or 3) nucleotides from the nucleotide sequence of the sense strand set forth in SEQ ID NO: 138. In some embodiments, the antisense strand comprises at least 19 (e.g., 20, 21, 22, 23, 24, 25, 26, 27, 28, 29, 30 (e.g., 19, 20, 21, 22, 23 (e.g., 23))) contiguous nucleotides differing by no more than 3 (e.g., 0, 1, 2, or 3) nucleotides from the nucleotide sequence of the antisense strand set forth in SEQ ID NO: 321; and the sense strand comprises at least 19 (e.g., 20, 21, 22, 23, 24, 25, 26, 27, 28, 29, 30 (e.g., 19, 20, 21, 22, 23 (e.g., 21))) contiguous nucleotides differing by no more than 3 (e.g., 0, 1, 2, or 3) nucleotides from the nucleotide sequence of the sense strand set forth in SEQ ID NO: 138. In some embodiments, the antisense strand comprises at least 21 (e.g., 22, 23, 24, 25, 26, 27, 28, 29, 30 (e.g., 21, 22, 23 (e.g., 23))) contiguous nucleotides differing by no more than 3 (e.g., 0, 1, 2, or 3) nucleotides from the nucleotide sequence of the antisense strand set forth in SEQ ID NO: 321; and the sense strand comprises at least 19 (e.g., 20, 21, 22, 23, 24, 25, 26, 27, 28, 29, 30 (e.g., 19, 20, 21, 22, 23 (e.g., 21))) contiguous nucleotides differing by no more than 3 (e.g., 0, 1, 2, or 3) nucleotides from the nucleotide sequence of the sense strand set forth in SEQ ID NO: 138. In some embodiments, the antisense strand comprises at least 21 (e.g., 22, 23, 24, 25, 26, 27, 28, 29, 30 (e.g., 21, 22, 23 (e.g., 23))) contiguous nucleotides differing by no more than 3 (e.g., 0, 1, 2, or 3) nucleotides from the nucleotide sequence of the antisense strand set forth in SEQ ID NO: 321; and the sense strand comprises at least 21 (e.g., 22, 23, 24, 25, 26, 27, 28, 29, 30 (e.g., 21, 22, 23 (e.g., 21))) contiguous nucleotides differing by no more than 3 (e.g., 0, 1, 2, or 3) nucleotides from the nucleotide sequence of the sense strand set forth in SEQ ID NO: 138. In some embodiments, the antisense strand comprises at least 23 (e.g., 24, 25, 26, 27, 28, 29, 30 (e.g., 23)) contiguous nucleotides differing by no more than 3 (e.g., 0, 1, 2, or 3) nucleotides from the nucleotide sequence of the antisense strand set forth in SEQ ID NO: 321; and the sense strand comprises at least 21 (e.g., 22, 23, 24, 25, 26, 27, 28, 29, 30 (e.g., 21, 22, 23 (e.g., 21))) contiguous nucleotides differing by no more than 3 (e.g., 0, 1, 2, or 3) nucleotides from the nucleotide sequence of the sense strand set forth in SEQ ID NO: 138.

[0536] In some embodiments, the antisense strand comprises from about 15-23 (e.g., 15-22, 15-21, 15-20, 15-19, 15-18, 15-17, 15-16, 16-22, 16-20, 16-19, 16-18, 16-17, 17-23, 17-22, 17-21, 17-20, 17-19, 17-18, 18-23, 18-22, 18-21, 18-20, 18-19, 19-23, 19-22, 19-21, 19-20, 20-23, 20-22, 20-21, 21-23, 21-22, 22-23) contiguous nucleotides differing by no more than 3 (e.g., 0, 1, 2, or 3) nucleotides from the nucleotide sequence of the antisense strand set forth in SEQ ID NO: 321; and the sense strand comprises from about 15-23 (e.g., 15-22, 15-21, 15-20, 15-19, 15-18, 15-17, 15-16, 16-22, 16-20, 16-19, 16-18, 16-17, 17-23, 17-22, 17-21, 17-20, 17-19, 17-18, 18-23, 18-22, 18-21, 18-20, 18-19, 19-23, 19-22, 19-21, 19-20, 20-23, 20-22, 20-21, 21-23, 21-22, 22-23) contiguous nucleotides differing by no more than 3 (e.g., 0, 1, 2, or 3) nucleotides from the nucleotide sequence of the sense strand set forth in SEQ ID NO: 138. In some embodiments, the antisense strand comprises from about 19-23 (e.g., 19-22, 19-21, 19-20, 20-23, 20-22, 20-21, 21-23, 21-22, 22-23) contiguous nucleotides differing by no more than 3 (e.g., 0, 1, 2, or 3) nucleotides from the nucleotide sequence of the antisense strand set forth in SEQ ID NO: 321; and the sense strand comprises from about 19-23 (e.g., 19-22, 19-21, 19-20, 20-23, 20-22, 20-21, 21-23, 21-22, 22-23) contiguous nucleotides differing by no more than 3 (e.g., 0, 1, 2, or 3) nucleotides from the nucleotide sequence of the sense strand set forth in SEQ ID NO: 138. In some embodiments, the antisense strand comprises from about from about 21-23 (e.g., 21-22, 22-23) contiguous nucleotides differing by no more than 3 (e.g., 0, 1, 2, or 3) nucleotides from the nucleotide sequence of the antisense strand set forth in SEQ ID NO: 321; and the sense strand comprises from about 19-23 (e.g., 19-22, 19-21, 19-20, 20-23, 20-22, 20-21, 21-23, 21-22, 22-23) contiguous nucleotides differing by no more than 3 (e.g., 0, 1, 2, or 3) nucleotides from the nucleotide sequence of the sense strand set forth in SEQ ID NO: 138. In some embodiments, the antisense strand comprises from about 21-23 (e.g., 21-22, 22-23) contiguous nucleotides differing by no more than 3 (e.g., 0, 1, 2, or 3) nucleotides from the nucleotide sequence of the antisense strand set forth in SEQ ID NO: 321; and the sense strand comprises from about 21-23 (e.g., 21-22, 22-23) contiguous nucleotides differing by no more than 3 (e.g., 0, 1, 2, or 3) nucleotides from the nucleotide sequence of the sense strand set forth in SEQ ID NO: 138.

[0537] In some embodiments, the antisense strand comprises about 15, 16, 17, 18, 19, 20, 21, 22, 23, 24, 25, 26, 27, 28, 29, or 30 (e.g., 19, 20, 21, 22, 23 (e.g., 23)) contiguous nucleotides differing by no more than 3 (e.g., 0, 1, 2, or 3) nucleotides from the nucleotide sequence of the antisense strand set forth in SEQ ID NO: 321; and the sense strand comprises about 15, 16, 17, 18, 19, 20, 21, 22, 23, 24, 25, 26, 27, 28, 29, or 30 (e.g., 19, 20, 21, 22, 23 (e.g., 21)) contiguous nucleotides differing by no more than 3 (e.g., 0, 1, 2, or 3) nucleotides from the nucleotide sequence of the sense strand set forth in SEQ ID NO: 138. In some embodiments, the antisense strand comprises about 19, 20, 21, 22, 23, 24, 25, 26, 27, 28, 29, 30 (e.g., 19, 20, 21, 22, 23 (e.g., 23)) contiguous nucleotides differing by no more than 3 (e.g., 0, 1, 2, or 3) nucleotides from the nucleotide sequence of the antisense strand set forth in SEQ ID NO: 321; and the sense strand comprises 19, 20, 21, 22, 23, 24, 25, 26, 27, 28, 29, 30 (e.g., 19, 20, 21, 22, 23 (e.g., 21)) contiguous nucleotides differing by no more than 3 (e.g., 0, 1, 2, or 3) nucleotides from the nucleotide sequence of the sense strand set forth in SEQ ID NO: 138. In some embodiments, the antisense strand comprises about 21, 22, 23, 24, 25, 26, 27, 28, 29, 30 (e.g., 21, 22, 23 (e.g., 23)) contiguous nucleotides differing by no more than 3 (e.g., 0, 1, 2, or 3) nucleotides from the nucleotide sequence of the antisense strand set forth in SEQ ID NO: 321; and the sense strand about 19, 20, 21, 22, 23, 24, 25, 26, 27, 28, 29, 30 (e.g., 19, 20, 21, 22, 23 (e.g., 21)) contiguous nucleotides differing by no more than 3 (e.g., 0, 1, 2, or 3) nucleotides from the nucleotide sequence of the sense strand set forth in SEQ ID NO: 138. In some embodiments, the antisense strand comprises about 21, 22, 23, 24, 25, 26, 27, 28, 29, 30 (e.g., 21, 22, 23 (e.g., 23)) contiguous nucleotides differing by no more than 3 (e.g., 0, 1, 2, or 3) nucleotides from the nucleotide sequence of the antisense strand set forth in SEQ ID NO: 321; and the sense strand comprises about 21, 22, 23, 24, 25, 26, 27, 28, 29, 30 (e.g., 21, 22, 23 (e.g., 21)) contiguous nucleotides differing by no more than 3 (e.g., 0, 1, 2, or 3) nucleotides from the nucleotide sequence of the sense strand set forth in SEQ ID NO: 138. In some embodiments, the antisense strand comprises about 23, 24, 25, 26, 27, 28, 29, 30 (e.g., 23) contiguous nucleotides differing by no more than 3 (e.g., 0, 1, 2, or 3) nucleotides from the nucleotide sequence of the antisense strand set forth in SEQ ID NO: 321; and the sense strand comprises about 21, 22, 23, 24, 25, 26, 27, 28, 29, 30 (e.g., 21, 22, 23 (e.g., 21)) contiguous nucleotides differing by no more than 3 (e.g., 0, 1, 2, or 3) nucleotides from the nucleotide sequence of the sense strand set forth in SEQ ID NO: 138. In some embodiments, the antisense strand comprises about 23 contiguous nucleotides differing by no more than 3 (e.g., 0, 1, 2, or 3) nucleotides from the nucleotide sequence of the antisense strand set forth in SEQ ID NO: 321; and the sense strand comprises about 21 contiguous nucleotides differing by no more than 3 (e.g., 0, 1, 2, or 3) nucleotides from the nucleotide sequence of the sense strand set forth in SEQ ID NO: 138. In some embodiments, the antisense strand comprises about 21 contiguous nucleotides differing by no more than 3 (e.g., 0, 1, 2, or 3) nucleotides from the nucleotide sequence of the antisense strand set forth in SEQ ID NO: 321; and the sense strand comprises about 19 contiguous nucleotides differing by no more than 3 (e.g., 0, 1, 2, or 3) nucleotides from the nucleotide sequence of the sense strand set forth in SEQ ID NO: 138.

[0538] In some embodiments, the nucleotide sequence of the antisense strand comprises the nucleotide sequence of the antisense strand set forth in SEQ ID NO: 321 differing by no more than 3 (e.g., 0, 1, 2, or 3) nucleotides from the nucleotide sequence of the antisense strand set forth in SEQ ID NO: 321; and the nucleotide sequence of the sense strand comprises the nucleotide sequence of the sense strand set forth in SEQ ID NO: 138 differing by no more than 3 (e.g., 0, 1, 2, or 3) nucleotides from the sense strand set forth in SEQ ID NO: 138.

[0539] In some embodiments, the nucleotide sequence of the antisense strand comprises the nucleotide sequence of antisense strand set forth in SEQ ID NO: 321; and the nucleotide sequence of the sense strand comprises the nucleotide sequence of the sense strand set forth in SEQ ID NO: 138.

[0540] In some embodiments, the antisense strand consists of about 15, 16, 17, 18, 19, 20, 21, 22, 23, 24, 25, 26, 27, 28, 29, or 30 (e.g., 19, 20, 21, 22, 23 (e.g., 23)) contiguous nucleotides differing by no more than 3 (e.g., 0, 1, 2, or 3) nucleotides from the nucleotide sequence of the antisense strand set forth in SEQ ID NO: 321; and the sense strand consists of about 15, 16, 17, 18, 19, 20, 21, 22, 23, 24, 25, 26, 27, 28, 29, or 30 (e.g., 19, 20, 21, 22, 23 (e.g., 21)) contiguous nucleotides differing by no more than 3 (e.g., 0, 1, 2, or 3) nucleotides from the nucleotide sequence of the sense strand set forth in SEQ ID NO: 138. In some embodiments, the antisense strand consists of about 19, 20, 21, 22, 23, 24, 25, 26, 27, 28, 29, 30 (e.g., 19, 20, 21, 22, 23 (e.g., 23)) contiguous nucleotides differing by no more than 3 (e.g., 0, 1, 2, or 3) nucleotides from the nucleotide sequence of the antisense strand set forth in SEQ ID NO: 321; and the sense strand consists of 19, 20, 21, 22, 23, 24, 25, 26, 27, 28, 29, 30 (e.g., 19, 20, 21, 22, 23 (e.g., 21)) contiguous nucleotides differing by no more than 3 (e.g., 0, 1, 2, or 3) nucleotides from the nucleotide sequence of the sense strand set forth in SEQ ID NO: 138. In some embodiments, the antisense strand consists of about 21, 22, 23, 24, 25, 26, 27, 28, 29, 30 (e.g., 21, 22, 23 (e.g., 23)) contiguous nucleotides differing by no more than 3 (e.g., 0, 1, 2, or 3) nucleotides from the nucleotide sequence of the antisense strand set forth in SEQ ID NO: 321; and the sense strand consists of about 19, 20, 21, 22, 23, 24, 25, 26, 27, 28, 29, 30 (e.g., 19, 20, 21, 22, 23 (e.g., 21)) contiguous nucleotides differing by no more than 3 (e.g., 0, 1, 2, or 3) nucleotides from the nucleotide sequence of the sense strand set forth in SEQ ID NO: 138. In some embodiments, the antisense strand consists of about 21, 22, 23, 24, 25, 26, 27, 28, 29, 30 (e.g., 21, 22, 23 (e.g., 23)) contiguous nucleotides differing by no more than 3 (e.g., 0, 1, 2, or 3) nucleotides from the nucleotide sequence of the antisense strand set forth in SEQ ID NO: 321; and the sense strand consists of at about 21, 22, 23, 24, 25, 26, 27, 28, 29, 30 (e.g., 21, 22, 23 (e.g., 21)) contiguous nucleotides differing by no more than 3 (e.g., 0, 1, 2, or 3) nucleotides from the nucleotide sequence of the sense strand set forth in SEQ ID NO: 138. In some embodiments, the antisense strand consists of about 23, 24, 25, 26, 27, 28, 29, 30 (e.g., 23) contiguous nucleotides differing by no more than 3 (e.g., 0, 1, 2, or 3) nucleotides from the nucleotide sequence of the antisense strand set forth in SEQ ID NO: 321; and the sense strand consists of about 21, 22, 23, 24, 25, 26, 27, 28, 29, 30 (e.g., 21, 22, 23 (e.g., 21)) contiguous nucleotides differing by no more than 3 (e.g., 0, 1, 2, or 3) nucleotides from the nucleotide sequence of the sense strand set forth in SEQ ID NO: 138. In some embodiments, the antisense strand consists of about 23 contiguous nucleotides differing by no more than 3 (e.g., 0, 1, 2, or 3) nucleotides from the nucleotide sequence of the antisense strand set forth in SEQ ID NO: 321; and the sense strand consists of about 21 contiguous nucleotides differing by no more than 3 (e.g., 0, 1, 2, or 3) nucleotides from the nucleotide sequence of the sense strand set forth in SEQ ID NO: 138. In some embodiments, the antisense strand consists of about 21 contiguous nucleotides differing by no more than 3 (e.g., 0, 1, 2, or 3) nucleotides from the nucleotide sequence of the antisense strand set forth in SEQ ID NO: 321; and the sense strand consists of about 19 contiguous nucleotides differing by no more than 3 (e.g., 0, 1, 2, or 3) nucleotides from the nucleotide sequence of the sense strand set forth in SEQ ID NO: 138.

[0541] In some embodiments, the nucleotide sequence of the antisense strand consists of the nucleotide sequence of the antisense strand set forth in SEQ ID NO: 321 differing by no more than 3 (e.g., 0, 1, 2, or 3) nucleotides from the nucleotide sequence of the antisense strand set forth in SEQ ID NO: 321; and the nucleotide sequence of the sense strand consists of the nucleotide sequence of the sense strand set forth in SEQ ID NO: 138 differing by no more than 3 (e.g., 0, 1, 2, or 3) nucleotides from the sense strand set forth in SEQ ID NO: 138.

[0542] In some embodiments, the nucleotide sequence of the antisense strand consists of the nucleotide sequence of antisense strand set forth in SEQ ID NO: 321; and the nucleotide sequence of the sense strand consists of the nucleotide sequence of the sense strand set forth in SEQ ID NO: 138.

[0543] In some embodiments, the nucleotide sequence of the antisense strand differs by no more than 5 (e.g., 0, 1, 2, 3, 4, or 5) nucleotides from the nucleotide sequence set forth in SEQ ID NO: 1062; and the nucleotide sequence of the sense strand differs by no more than 5 (e.g., 0, 1, 2, 3, 4, or 5) nucleotides from the nucleotide sequence set forth in SEQ ID NO: 827. In some embodiments, the nucleotide sequence of the antisense strand differs by no more than 3 (e.g., 0, 1, 2, or 3) nucleotides from the nucleotide sequence set forth in SEQ ID NO: 1062; and the nucleotide sequence of the sense strand differs by no more than 3 (e.g., 0, 1, 2, or 3) nucleotides from the nucleotide sequence set forth in SEQ ID NO: 827. In some embodiments, the nucleotide sequence of the antisense strand differs by no more than 2 (e.g., 0, 1, or 2) nucleotides from the nucleotide sequence set forth in SEQ ID NO: 1062; and the nucleotide sequence of the sense strand differs by no more than 2 (e.g., 0, 1, or 2) nucleotides from the nucleotide sequence set forth in SEQ ID NO: 827. In some embodiments, the nucleotide sequence of the antisense strand differs by no more than 1 (e.g., 0 or 1) nucleotide from the nucleotide sequence set forth in SEQ ID NO: 1062; and the nucleotide sequence of the sense strand differs by no more than 1 (e.g., 0 or 1) nucleotide from the nucleotide sequence set forth in SEQ ID NO: 827.

[0544] In some embodiments, the nucleotide sequence of the antisense strand comprises the nucleotide sequence set forth in SEQ ID NO: 1062 differing by no more than 5 (e.g., 0, 1, 2, 3, 4, or 5) nucleotides from the nucleotide sequence set forth in SEQ ID NO: 1062; and the nucleotide sequence of the sense strand comprises the nucleotide sequence set forth in SEQ ID NO: 1062 differing by no more than 5 (e.g., 0, 1, 2, 3, 4, or 5) nucleotides from the nucleotide sequence set forth in SEQ ID NO: 827. In some embodiments, the nucleotide sequence of the antisense strand comprises the nucleotide sequence set forth in SEQ ID NO: 1062 differing by no more than 3 (e.g., 0, 1, 2, or 3) nucleotides from the nucleotide sequence set forth in SEQ ID NO: 1062; and the nucleotide sequence of the sense strand comprises the nucleotide sequence set forth in SEQ ID NO: 827 differing by no more than 3 (e.g., 0, 1, 2, or 3) nucleotides from the nucleotide sequence set forth in SEQ ID NO: 827. In some embodiments, the nucleotide sequence of the antisense strand comprises the nucleotide sequence set forth in SEQ ID NO: 1062 differing by no more than 2 (e.g., 0, 1, or 2) nucleotides from the nucleotide sequence set forth in SEQ ID NO: 1062; and the nucleotide sequence of the sense strand comprises the nucleotide sequence set forth in SEQ ID NO: 827 differing by no more than 2 (e.g., 0, 1, or 2) nucleotides from the nucleotide sequence set forth in SEQ ID NO: 827. In some embodiments, the nucleotide sequence of the antisense strand comprises the nucleotide sequence set forth in SEQ ID NO: 1062 differing by no more than 1 (e.g., 0 or 1) nucleotide from nucleotide sequence set forth in SEQ ID NO: 1062; and the nucleotide sequence of the sense strand comprises the nucleotide sequence set forth in SEQ ID NO: 827 differing by no more than 1 (e.g., 0 or 1) nucleotide from nucleotide sequence set forth in SEQ ID NO: 827.

[0545] In some embodiments, the nucleotide sequence of the antisense strand is at least 85%, 86%, 87%, 88%, 89%, 90%, 91%, 92%, 93%, 94%, 95%, 96%, 97%, 98%, 99% or 100% identical to the nucleotide sequence set forth in SEQ ID NO: 1062; and the nucleotide sequence of the sense strand is at least 85%, 86%, 87%, 88%, 89%, 90%, 91%, 92%, 93%, 94%, 95%, 96%, 97%, 98%, 99% or 100% identical to the nucleotide sequence set forth in SEQ ID NO: 827. In some embodiments, the nucleotide sequence of the antisense strand is at least 90%, 91%, 92%, 93%, 94%, 95%, 96%, 97%, 98%, 99% or 100% identical to the nucleotide sequence set forth in SEQ ID NO: 1062; and the nucleotide sequence of the sense strand is at least 90%, 91%, 92%, 93%, 94%, 95%, 96%, 97%, 98%, 99% or 100% identical to the nucleotide sequence set forth in SEQ ID NO: 827. In some embodiments, the nucleotide sequence of the antisense strand is at least 95%, 96%, 97%, 98%, 99% or 100% identical to the nucleotide sequence set forth in SEQ ID NO: 1062; and the nucleotide sequence of the sense strand is at least 95%, 96%, 97%, 98%, 99% or 100% identical to the nucleotide sequence set forth in SEQ ID NO: 827. In some embodiments, the nucleotide sequence of the antisense strand is at least 96%, 97%, 98%, 99% or 100% identical to the nucleotide sequence set forth in SEQ ID NO: 1062; and the nucleotide sequence of the sense strand is at least 96%, 97%, 98%, 99% or 100% identical to the nucleotide sequence set forth in SEQ ID NO: 827. In some embodiments, the nucleotide sequence of the antisense strand is at least 97%, identical to the nucleotide sequence set forth in SEQ ID NO: 1062; and the nucleotide sequence of the sense strand is at least 97%, identical to the nucleotide sequence set forth in SEQ ID NO: 827. In some embodiments, the nucleotide sequence of the antisense strand is at least 98% identical to the nucleotide sequence set forth in SEQ ID NO: 1062; and the nucleotide sequence of the sense strand is at least 98% identical to the nucleotide sequence set forth in SEQ ID NO: 827. In some embodiments, the nucleotide sequence of the antisense strand is at least 99% identical to the nucleotide sequence set forth in SEQ ID NO: 1062; and the nucleotide sequence of the sense strand is at least 99% identical to the nucleotide sequence set forth in SEQ ID NO: 827. In some embodiments, the nucleotide sequence of the antisense strand is 100% identical to the nucleotide sequence set forth in SEQ ID NO: 1062; and the nucleotide sequence of the sense strand is 100% identical to the nucleotide sequence set forth in SEQ ID NO: 827.

[0546] In some embodiments, the nucleotide sequence of the antisense strand comprises the nucleotide sequence set forth in SEQ ID NO: 1062; and the nucleotide sequence of the sense strand comprises the nucleotide sequence set forth in SEQ ID NO: 827. In some embodiments, the nucleotide sequence of the antisense strand consists of the nucleotide sequence set forth in SEQ ID NO: 1062; and the nucleotide sequence of the sense strand consists of the nucleotide sequence set forth in SEQ ID NO: 827.

[0547] In some embodiments, the antisense strand comprises at least 15 (e.g., 15, 16, 17, 18, 19, 20, 21, 22, 23, 24, 25, 26, 27, 28, 29, 30 (e.g., 19, 20, 21, 22, 23 (e.g., 23))) contiguous nucleotides differing by no more than 3 (e.g., 0, 1, 2, or 3) nucleotides from the nucleotide sequence of the antisense strand set forth in SEQ ID NO: 1062; and the sense strand comprises at least 15 (e.g., 15, 16, 17, 18, 19, 20, 21, 22, 23, 24, 25, 26, 27, 28, 29, 30 (e.g., 19, 20, 21, 22, 23 (e.g., 21))) contiguous nucleotides differing by no more than 3 (e.g., 0, 1, 2, or 3) nucleotides from the nucleotide sequence of the sense strand set forth in SEQ ID NO: 827. In some embodiments, the antisense strand comprises at least 19 (e.g., 20, 21, 22, 23, 24, 25, 26, 27, 28, 29, 30 (e.g., 19, 20, 21, 22, 23 (e.g., 23))) contiguous nucleotides differing by no more than 3 (e.g., 0, 1, 2, or 3) nucleotides from the nucleotide sequence of the antisense strand set forth in SEQ ID NO: 1062; and the sense strand comprises at least 19 (e.g., 20, 21, 22, 23, 24, 25, 26, 27, 28, 29, 30 (e.g., 19, 20, 21, 22, 23 (e.g., 21))) contiguous nucleotides differing by no more than 3 (e.g., 0, 1, 2, or 3) nucleotides from the nucleotide sequence of the sense strand set forth in SEQ ID NO: 827. In some embodiments, the antisense strand comprises at least 21 (e.g., 22, 23, 24, 25, 26, 27, 28, 29, 30 (e.g., 21, 22, 23 (e.g., 23))) contiguous nucleotides differing by no more than 3 (e.g., 0, 1, 2, or 3) nucleotides from the nucleotide sequence of the antisense strand set forth in SEQ ID NO: 1062; and the sense strand comprises at least 19 (e.g., 20, 21, 22, 23, 24, 25, 26, 27, 28, 29, 30 (e.g., 19, 20, 21, 22, 23 (e.g., 21))) contiguous nucleotides differing by no more than 3 (e.g., 0, 1, 2, or 3) nucleotides from the nucleotide sequence of the sense strand set forth in SEQ ID NO: 827. In some embodiments, the antisense strand comprises at least 21 (e.g., 22, 23, 24, 25, 26, 27, 28, 29, 30 (e.g., 21, 22, 23 (e.g., 23))) contiguous nucleotides differing by no more than 3 (e.g., 0, 1, 2, or 3) nucleotides from the nucleotide sequence of the antisense strand set forth in SEQ ID NO: 1062; and the sense strand comprises at least 21 (e.g., 22, 23, 24, 25, 26, 27, 28, 29, 30 (e.g., 21, 22, 23 (e.g., 21))) contiguous nucleotides differing by no more than 3 (e.g., 0, 1, 2, or 3) nucleotides from the nucleotide sequence of the sense strand set forth in SEQ ID NO: 827. In some embodiments, the antisense strand comprises at least 23 (e.g., 24, 25, 26, 27, 28, 29, 30 (e.g., 23)) contiguous nucleotides differing by no more than 3 (e.g., 0, 1, 2, or 3) nucleotides from the nucleotide sequence of the antisense strand set forth in SEQ ID NO: 1062; and the sense strand comprises at least 21 (e.g., 22, 23, 24, 25, 26, 27, 28, 29, 30 (e.g., 21, 22, 23 (e.g., 21))) contiguous nucleotides differing by no more than 3 (e.g., 0, 1, 2, or 3) nucleotides from the nucleotide sequence of the sense strand set forth in SEQ ID NO: 827.

[0548] In some embodiments, the antisense strand comprises from about 15-23 (e.g., 15-22, 15-21, 15-20, 15-19, 15-18, 15-17, 15-16, 16-22, 16-20, 16-19, 16-18, 16-17, 17-23, 17-22, 17-21, 17-20, 17-19, 17-18, 18-23, 18-22, 18-21, 18-20, 18-19, 19-23, 19-22, 19-21, 19-20, 20-23, 20-22, 20-21, 21-23, 21-22, 22-23) contiguous nucleotides differing by no more than 3 (e.g., 0, 1, 2, or 3) nucleotides from the nucleotide sequence of the antisense strand set forth in SEQ ID NO: 1062; and the sense strand comprises from about 15-23 (e.g., 15-22, 15-21, 15-20, 15-19, 15-18, 15-17, 15-16, 16-22, 16-20, 16-19, 16-18, 16-17, 17-23, 17-22, 17-21, 17-20, 17-19, 17-18, 18-23, 18-22, 18-21, 18-20, 18-19, 19-23, 19-22, 19-21, 19-20, 20-23, 20-22, 20-21, 21-23, 21-22, 22-23) contiguous nucleotides differing by no more than 3 (e.g., 0, 1, 2, or 3) nucleotides from the nucleotide sequence of the sense strand set forth in SEQ ID NO: 827. In some embodiments, the antisense strand comprises from about 19-23 (e.g., 19-22, 19-21, 19-20, 20-23, 20-22, 20-21, 21-23, 21-22, 22-23) contiguous nucleotides differing by no more than 3 (e.g., 0, 1, 2, or 3) nucleotides from the nucleotide sequence of the antisense strand set forth in SEQ ID NO: 1062; and the sense strand comprises from about 19-23 (e.g., 19-22, 19-21, 19-20, 20-23, 20-22, 20-21, 21-23, 21-22, 22-23) contiguous nucleotides differing by no more than 3 (e.g., 0, 1, 2, or 3) nucleotides from the nucleotide sequence of the sense strand set forth in SEQ ID NO: 827. In some embodiments, the antisense strand comprises from about from about 21-23 (e.g., 21-22, 22-23) contiguous nucleotides differing by no more than 3 (e.g., 0, 1, 2, or 3) nucleotides from the nucleotide sequence of the antisense strand set forth in SEQ ID NO: 1062; and the sense strand comprises from about 19-23 (e.g., 19-22, 19-21, 19-20, 20-23, 20-22, 20-21, 21-23, 21-22, 22-23) contiguous nucleotides differing by no more than 3 (e.g., 0, 1, 2, or 3) nucleotides from the nucleotide sequence of the sense strand set forth in SEQ ID NO: 827. In some embodiments, the antisense strand comprises from about 21-23 (e.g., 21-22, 22-23) contiguous nucleotides differing by no more than 3 (e.g., 0, 1, 2, or 3) nucleotides from the nucleotide sequence of the antisense strand set forth in SEQ ID NO: 1062; and the sense strand comprises from about 21-23 (e.g., 21-22, 22-23) contiguous nucleotides differing by no more than 3 (e.g., 0, 1, 2, or 3) nucleotides from the nucleotide sequence of the sense strand set forth in SEQ ID NO: 827.

[0549] In some embodiments, the antisense strand comprises about 15, 16, 17, 18, 19, 20, 21, 22, 23, 24, 25, 26, 27, 28, 29, or 30 (e.g., 19, 20, 21, 22, 23 (e.g., 23)) contiguous nucleotides differing by no more than 3 (e.g., 0, 1, 2, or 3) nucleotides from the nucleotide sequence of the antisense strand set forth in SEQ ID NO: 1062; and the sense strand comprises about 15, 16, 17, 18, 19, 20, 21, 22, 23, 24, 25, 26, 27, 28, 29, or 30 (e.g., 19, 20, 21, 22, 23 (e.g., 21)) contiguous nucleotides differing by no more than 3 (e.g., 0, 1, 2, or 3) nucleotides from the nucleotide sequence of the sense strand set forth in SEQ ID NO: 827. In some embodiments, the antisense strand comprises about 19, 20, 21, 22, 23, 24, 25, 26, 27, 28, 29, 30 (e.g., 19, 20, 21, 22, 23 (e.g., 23)) contiguous nucleotides differing by no more than 3 (e.g., 0, 1, 2, or 3) nucleotides from the nucleotide sequence of the antisense strand set forth in SEQ ID NO: 1062; and the sense strand comprises 19, 20, 21, 22, 23, 24, 25, 26, 27, 28, 29, 30 (e.g., 19, 20, 21, 22, 23 (e.g., 21)) contiguous nucleotides differing by no more than 3 (e.g., 0, 1, 2, or 3) nucleotides from the nucleotide sequence of the sense strand set forth in SEQ ID NO: 827. In some embodiments, the antisense strand comprises about 21, 22, 23, 24, 25, 26, 27, 28, 29, 30 (e.g., 21, 22, 23 (e.g., 23)) contiguous nucleotides differing by no more than 3 (e.g., 0, 1, 2, or 3) nucleotides from the nucleotide sequence of the antisense strand set forth in SEQ ID NO: 1062; and the sense strand about 19, 20, 21, 22, 23, 24, 25, 26, 27, 28, 29, 30 (e.g., 19, 20, 21, 22, 23 (e.g., 21)) contiguous nucleotides differing by no more than 3 (e.g., 0, 1, 2, or 3) nucleotides from the nucleotide sequence of the sense strand set forth in SEQ ID NO: 827. In some embodiments, the antisense strand comprises about 21, 22, 23, 24, 25, 26, 27, 28, 29, 30 (e.g., 21, 22, 23 (e.g., 23)) contiguous nucleotides differing by no more than 3 (e.g., 0, 1, 2, or 3) nucleotides from the nucleotide sequence of the antisense strand set forth in SEQ ID NO: 1062; and the sense strand comprises about 21, 22, 23, 24, 25, 26, 27, 28, 29, 30 (e.g., 21, 22, 23 (e.g., 21)) contiguous nucleotides differing by no more than 3 (e.g., 0, 1, 2, or 3) nucleotides from the nucleotide sequence of the sense strand set forth in SEQ ID NO: 827. In some embodiments, the antisense strand comprises about 23, 24, 25, 26, 27, 28, 29, 30 (e.g., 23) contiguous nucleotides differing by no more than 3 (e.g., 0, 1, 2, or 3) nucleotides from the nucleotide sequence of the antisense strand set forth in SEQ ID NO: 1062; and the sense strand comprises about 21, 22, 23, 24, 25, 26, 27, 28, 29, 30 (e.g., 21, 22, 23 (e.g., 21)) contiguous nucleotides differing by no more than 3 (e.g., 0, 1, 2, or 3) nucleotides from the nucleotide sequence of the sense strand set forth in SEQ ID NO: 827. In some embodiments, the antisense strand comprises about 23 contiguous nucleotides differing by no more than 3 (e.g., 0, 1, 2, or 3) nucleotides from the nucleotide sequence of the antisense strand set forth in SEQ ID NO: 1062; and the sense strand comprises about 21 contiguous nucleotides differing by no more than 3 (e.g., 0, 1, 2, or 3) nucleotides from the nucleotide sequence of the sense strand set forth in SEQ ID NO: 827. In some embodiments, the antisense strand comprises about 21 contiguous nucleotides differing by no more than 3 (e.g., 0, 1, 2, or 3) nucleotides from the nucleotide sequence of the antisense strand set forth in SEQ ID NO: 1062; and the sense strand comprises about 19 contiguous nucleotides differing by no more than 3 (e.g., 0, 1, 2, or 3) nucleotides from the nucleotide sequence of the sense strand set forth in SEQ ID NO: 827.

[0550] In some embodiments, the nucleotide sequence of the antisense strand comprises the nucleotide sequence of the antisense strand set forth in SEQ ID NO: 1062 differing by no more than 3 (e.g., 0, 1, 2, or 3) nucleotides from the nucleotide sequence of the antisense strand set forth in SEQ ID NO: 1062; and the nucleotide sequence of the sense strand comprises the nucleotide sequence of the sense strand set forth in SEQ ID NO: 827 differing by no more than 3 (e.g., 0, 1, 2, or 3) nucleotides from the sense strand set forth in SEQ ID NO: 827.

[0551] In some embodiments, the nucleotide sequence of the antisense strand comprises the nucleotide sequence of antisense strand set forth in SEQ ID NO: 1062; and the nucleotide sequence of the sense strand comprises the nucleotide sequence of the sense strand set forth in SEQ ID NO: 827.

[0552] In some embodiments, the antisense strand consists of about 15, 16, 17, 18, 19, 20, 21, 22, 23, 24, 25, 26, 27, 28, 29, or 30 (e.g., 19, 20, 21, 22, 23 (e.g., 23)) contiguous nucleotides differing by no more than 3 (e.g., 0, 1, 2, or 3) nucleotides from the nucleotide sequence of the antisense strand set forth in SEQ ID NO: 1062; and the sense strand consists of about 15, 16, 17, 18, 19, 20, 21, 22, 23, 24, 25, 26, 27, 28, 29, or 30 (e.g., 19, 20, 21, 22, 23 (e.g., 21)) contiguous nucleotides differing by no more than 3 (e.g., 0, 1, 2, or 3) nucleotides from the nucleotide sequence of the sense strand set forth in SEQ ID NO: 827. In some embodiments, the antisense strand consists of about 19, 20, 21, 22, 23, 24, 25, 26, 27, 28, 29, 30 (e.g., 19, 20, 21, 22, 23 (e.g., 23)) contiguous nucleotides differing by no more than 3 (e.g., 0, 1, 2, or 3) nucleotides from the nucleotide sequence of the antisense strand set forth in SEQ ID NO: 1062; and the sense strand consists of 19, 20, 21, 22, 23, 24, 25, 26, 27, 28, 29, 30 (e.g., 19, 20, 21, 22, 23 (e.g., 21)) contiguous nucleotides differing by no more than 3 (e.g., 0, 1, 2, or 3) nucleotides from the nucleotide sequence of the sense strand set forth in SEQ ID NO: 827. In some embodiments, the antisense strand consists of about 21, 22, 23, 24, 25, 26, 27, 28, 29, 30 (e.g., 21, 22, 23 (e.g., 23)) contiguous nucleotides differing by no more than 3 (e.g., 0, 1, 2, or 3) nucleotides from the nucleotide sequence of the antisense strand set forth in SEQ ID NO: 1062; and the sense strand consists of about 19, 20, 21, 22, 23, 24, 25, 26, 27, 28, 29, 30 (e.g., 19, 20, 21, 22, 23 (e.g., 21)) contiguous nucleotides differing by no more than 3 (e.g., 0, 1, 2, or 3) nucleotides from the nucleotide sequence of the sense strand set forth in SEQ ID NO: 827. In some embodiments, the antisense strand consists of about 21, 22, 23, 24, 25, 26, 27, 28, 29, 30 (e.g., 21, 22, 23 (e.g., 23)) contiguous nucleotides differing by no more than 3 (e.g., 0, 1, 2, or 3) nucleotides from the nucleotide sequence of the antisense strand set forth in SEQ ID NO: 1062; and the sense strand consists of at about 21, 22, 23, 24, 25, 26, 27, 28, 29, 30 (e.g., 21, 22, 23 (e.g., 21)) contiguous nucleotides differing by no more than 3 (e.g., 0, 1, 2, or 3) nucleotides from the nucleotide sequence of the sense strand set forth in SEQ ID NO: 827. In some embodiments, the antisense strand consists of about 23, 24, 25, 26, 27, 28, 29, 30 (e.g., 23) contiguous nucleotides differing by no more than 3 (e.g., 0, 1, 2, or 3) nucleotides from the nucleotide sequence of the antisense strand set forth in SEQ ID NO: 1062; and the sense strand consists of about 21, 22, 23, 24, 25, 26, 27, 28, 29, 30 (e.g., 21, 22, 23 (e.g., 21)) contiguous nucleotides differing by no more than 3 (e.g., 0, 1, 2, or 3) nucleotides from the nucleotide sequence of the sense strand set forth in SEQ ID NO: 827. In some embodiments, the antisense strand consists of about 23 contiguous nucleotides differing by no more than 3 (e.g., 0, 1, 2, or 3) nucleotides from the nucleotide sequence of the antisense strand set forth in SEQ ID NO: 1062; and the sense strand consists of about 21 contiguous nucleotides differing by no more than 3 (e.g., 0, 1, 2, or 3) nucleotides from the nucleotide sequence of the sense strand set forth in SEQ ID NO: 827. In some embodiments, the antisense strand consists of about 21 contiguous nucleotides differing by no more than 3 (e.g., 0, 1, 2, or 3) nucleotides from the nucleotide sequence of the antisense strand set forth in SEQ ID NO: 1062; and the sense strand consists of about 19 contiguous nucleotides differing by no more than 3 (e.g., 0, 1, 2, or 3) nucleotides from the nucleotide sequence of the sense strand set forth in SEQ ID NO: 827.

[0553] In some embodiments, the nucleotide sequence of the antisense strand consists of the nucleotide sequence of the antisense strand set forth in SEQ ID NO: 1062 differing by no more than 3 (e.g., 0, 1, 2, or 3) nucleotides from the nucleotide sequence of the antisense strand set forth in SEQ ID NO: 1062; and the nucleotide sequence of the sense strand consists of the nucleotide sequence of the sense strand set forth in SEQ ID NO: 827 differing by no more than 3 (e.g., 0, 1, 2, or 3) nucleotides from the sense strand set forth in SEQ ID NO: 827.

[0554] In some embodiments, the nucleotide sequence of the antisense strand consists of the nucleotide sequence of antisense strand set forth in SEQ ID NO: 1062; and the nucleotide sequence of the sense strand consists of the nucleotide sequence of the sense strand set forth in SEQ ID NO: 827.

[0555] In some embodiments, the nucleotide sequence of the antisense strand differs by no more than 5 (e.g., 0, 1, 2, 3, 4, or 5) nucleotides from the nucleotide sequence set forth in SEQ ID NO: 1189; and the nucleotide sequence of the sense strand differs by no more than 5 (e.g., 0, 1, 2, 3, 4, or 5) nucleotides from the nucleotide sequence set forth in SEQ ID NO: 792. In some embodiments, the nucleotide sequence of the antisense strand differs by no more than 3 (e.g., 0, 1, 2, or 3) nucleotides from the nucleotide sequence set forth in SEQ ID NO: 1189; and the nucleotide sequence of the sense strand differs by no more than 3 (e.g., 0, 1, 2, or 3) nucleotides from the nucleotide sequence set forth in SEQ ID NO: 792. In some embodiments, the nucleotide sequence of the antisense strand differs by no more than 2 (e.g., 0, 1, or 2) nucleotides from the nucleotide sequence set forth in SEQ ID NO: 1189; and the nucleotide sequence of the sense strand differs by no more than 2 (e.g., 0, 1, or 2) nucleotides from the nucleotide sequence set forth in SEQ ID NO: 792. In some embodiments, the nucleotide sequence of the antisense strand differs by no more than 1 (e.g., 0 or 1) nucleotide from the nucleotide sequence set forth in SEQ ID NO: 1189; and the nucleotide sequence of the sense strand differs by no more than 1 (e.g., 0 or 1) nucleotide from the nucleotide sequence set forth in SEQ ID NO: 792.

[0556] In some embodiments, the nucleotide sequence of the antisense strand comprises the nucleotide sequence set forth in SEQ ID NO: 1189 differing by no more than 5 (e.g., 0, 1, 2, 3, 4, or 5) nucleotides from the nucleotide sequence set forth in SEQ ID NO: 1189; and the nucleotide sequence of the sense strand comprises the nucleotide sequence set forth in SEQ ID NO: 1189 differing by no more than 5 (e.g., 0, 1, 2, 3, 4, or 5) nucleotides from the nucleotide sequence set forth in SEQ ID NO: 792. In some embodiments, the nucleotide sequence of the antisense strand comprises the nucleotide sequence set forth in SEQ ID NO: 1189 differing by no more than 3 (e.g., 0, 1, 2, or 3) nucleotides from the nucleotide sequence set forth in SEQ ID NO: 1189; and the nucleotide sequence of the sense strand comprises the nucleotide sequence set forth in SEQ ID NO: 792 differing by no more than 3 (e.g., 0, 1, 2, or 3) nucleotides from the nucleotide sequence set forth in SEQ ID NO: 792. In some embodiments, the nucleotide sequence of the antisense strand comprises the nucleotide sequence set forth in SEQ ID NO: 1189 differing by no more than 2 (e.g., 0, 1, or 2) nucleotides from the nucleotide sequence set forth in SEQ ID NO: 1189; and the nucleotide sequence of the sense strand comprises the nucleotide sequence set forth in SEQ ID NO: 792 differing by no more than 2 (e.g., 0, 1, or 2) nucleotides from the nucleotide sequence set forth in SEQ ID NO: 792. In some embodiments, the nucleotide sequence of the antisense strand comprises the nucleotide sequence set forth in SEQ ID NO: 1189 differing by no more than 1 (e.g., 0 or 1) nucleotide from nucleotide sequence set forth in SEQ ID NO: 1189; and the nucleotide sequence of the sense strand comprises the nucleotide sequence set forth in SEQ ID NO: 792 differing by no more than 1 (e.g., 0 or 1) nucleotide from nucleotide sequence set forth in SEQ ID NO: 792.

[0557] In some embodiments, the nucleotide sequence of the antisense strand is at least 85%, 86%, 87%, 88%, 89%, 90%, 91%, 92%, 93%, 94%, 95%, 96%, 97%, 98%, 99% or 100% identical to the nucleotide sequence set forth in SEQ ID NO: 1189; and the nucleotide sequence of the sense strand is at least 85%, 86%, 87%, 88%, 89%, 90%, 91%, 92%, 93%, 94%, 95%, 96%, 97%, 98%, 99% or 100% identical to the nucleotide sequence set forth in SEQ ID NO: 792. In some embodiments, the nucleotide sequence of the antisense strand is at least 90%, 91%, 92%, 93%, 94%, 95%, 96%, 97%, 98%, 99% or 100% identical to the nucleotide sequence set forth in SEQ ID NO: 1189; and the nucleotide sequence of the sense strand is at least 90%, 91%, 92%, 93%, 94%, 95%, 96%, 97%, 98%, 99% or 100% identical to the nucleotide sequence set forth in SEQ ID NO: 792. In some embodiments, the nucleotide sequence of the antisense strand is at least 95%, 96%, 97%, 98%, 99% or 100% identical to the nucleotide sequence set forth in SEQ ID NO: 1189; and the nucleotide sequence of the sense strand is at least 95%, 96%, 97%, 98%, 99% or 100% identical to the nucleotide sequence set forth in SEQ ID NO: 792. In some embodiments, the nucleotide sequence of the antisense strand is at least 96%, 97%, 98%, 99% or 100% identical to the nucleotide sequence set forth in SEQ ID NO: 1189; and the nucleotide sequence of the sense strand is at least 96%, 97%, 98%, 99% or 100% identical to the nucleotide sequence set forth in SEQ ID NO: 792. In some embodiments, the nucleotide sequence of the antisense strand is at least 97%, identical to the nucleotide sequence set forth in SEQ ID NO: 1189; and the nucleotide sequence of the sense strand is at least 97%, identical to the nucleotide sequence set forth in SEQ ID NO: 792. In some embodiments, the nucleotide sequence of the antisense strand is at least 98% identical to the nucleotide sequence set forth in SEQ ID NO: 1189; and the nucleotide sequence of the sense strand is at least 98% identical to the nucleotide sequence set forth in SEQ ID NO: 792. In some embodiments, the nucleotide sequence of the antisense strand is at least 99% identical to the nucleotide sequence set forth in SEQ ID NO: 1189; and the nucleotide sequence of the sense strand is at least 99% identical to the nucleotide sequence set forth in SEQ ID NO: 792. In some embodiments, the nucleotide sequence of the antisense strand is 100% identical to the nucleotide sequence set forth in SEQ ID NO: 1189; and the nucleotide sequence of the sense strand is 100% identical to the nucleotide sequence set forth in SEQ ID NO: 792.

[0558] In some embodiments, the nucleotide sequence of the antisense strand comprises the nucleotide sequence set forth in SEQ ID NO: 1189; and the nucleotide sequence of the sense strand comprises the nucleotide sequence set forth in SEQ ID NO: 792. In some embodiments, the nucleotide sequence of the antisense strand consists of the nucleotide sequence set forth in SEQ ID NO: 1189; and the nucleotide sequence of the sense strand consists of the nucleotide sequence set forth in SEQ ID NO: 792.

[0559] In some embodiments, the antisense strand comprises at least 15 (e.g., 15, 16, 17, 18, 19, 20, 21, 22, 23, 24, 25, 26, 27, 28, 29, 30 (e.g., 19, 20, 21, 22, 23 (e.g., 23))) contiguous nucleotides differing by no more than 3 (e.g., 0, 1, 2, or 3) nucleotides from the nucleotide sequence of the antisense strand set forth in SEQ ID NO: 1189; and the sense strand comprises at least 15 (e.g., 15, 16, 17, 18, 19, 20, 21, 22, 23, 24, 25, 26, 27, 28, 29, 30 (e.g., 19, 20, 21, 22, 23 (e.g., 21))) contiguous nucleotides differing by no more than 3 (e.g., 0, 1, 2, or 3) nucleotides from the nucleotide sequence of the sense strand set forth in SEQ ID NO: 792. In some embodiments, the antisense strand comprises at least 19 (e.g., 20, 21, 22, 23, 24, 25, 26, 27, 28, 29, 30 (e.g., 19, 20, 21, 22, 23 (e.g., 23))) contiguous nucleotides differing by no more than 3 (e.g., 0, 1, 2, or 3) nucleotides from the nucleotide sequence of the antisense strand set forth in SEQ ID NO: 1189; and the sense strand comprises at least 19 (e.g., 20, 21, 22, 23, 24, 25, 26, 27, 28, 29, 30 (e.g., 19, 20, 21, 22, 23 (e.g., 21))) contiguous nucleotides differing by no more than 3 (e.g., 0, 1, 2, or 3) nucleotides from the nucleotide sequence of the sense strand set forth in SEQ ID NO: 792. In some embodiments, the antisense strand comprises at least 21 (e.g., 22, 23, 24, 25, 26, 27, 28, 29, 30 (e.g., 21, 22, 23 (e.g., 23))) contiguous nucleotides differing by no more than 3 (e.g., 0, 1, 2, or 3) nucleotides from the nucleotide sequence of the antisense strand set forth in SEQ ID NO: 1189; and the sense strand comprises at least 19 (e.g., 20, 21, 22, 23, 24, 25, 26, 27, 28, 29, 30 (e.g., 19, 20, 21, 22, 23 (e.g., 21))) contiguous nucleotides differing by no more than 3 (e.g., 0, 1, 2, or 3) nucleotides from the nucleotide sequence of the sense strand set forth in SEQ ID NO: 792. In some embodiments, the antisense strand comprises at least 21 (e.g., 22, 23, 24, 25, 26, 27, 28, 29, 30 (e.g., 21, 22, 23 (e.g., 23))) contiguous nucleotides differing by no more than 3 (e.g., 0, 1, 2, or 3) nucleotides from the nucleotide sequence of the antisense strand set forth in SEQ ID NO: 1189; and the sense strand comprises at least 21 (e.g., 22, 23, 24, 25, 26, 27, 28, 29, 30 (e.g., 21, 22, 23 (e.g., 21))) contiguous nucleotides differing by no more than 3 (e.g., 0, 1, 2, or 3) nucleotides from the nucleotide sequence of the sense strand set forth in SEQ ID NO: 792. In some embodiments, the antisense strand comprises at least 23 (e.g., 24, 25, 26, 27, 28, 29, 30 (e.g., 23)) contiguous nucleotides differing by no more than 3 (e.g., 0, 1, 2, or 3) nucleotides from the nucleotide sequence of the antisense strand set forth in SEQ ID NO: 1189; and the sense strand comprises at least 21 (e.g., 22, 23, 24, 25, 26, 27, 28, 29, 30 (e.g., 21, 22, 23 (e.g., 21))) contiguous nucleotides differing by no more than 3 (e.g., 0, 1, 2, or 3) nucleotides from the nucleotide sequence of the sense strand set forth in SEQ ID NO: 792.

[0560] In some embodiments, the antisense strand comprises from about 15-23 (e.g., 15-22, 15-21, 15-20, 15-19, 15-18, 15-17, 15-16, 16-22, 16-20, 16-19, 16-18, 16-17, 17-23, 17-22, 17-21, 17-20, 17-19, 17-18, 18-23, 18-22, 18-21, 18-20, 18-19, 19-23, 19-22, 19-21, 19-20, 20-23, 20-22, 20-21, 21-23, 21-22, 22-23) contiguous nucleotides differing by no more than 3 (e.g., 0, 1, 2, or 3) nucleotides from the nucleotide sequence of the antisense strand set forth in SEQ ID NO: 1189; and the sense strand comprises from about 15-23 (e.g., 15-22, 15-21, 15-20, 15-19, 15-18, 15-17, 15-16, 16-22, 16-20, 16-19, 16-18, 16-17, 17-23, 17-22, 17-21, 17-20, 17-19, 17-18, 18-23, 18-22, 18-21, 18-20, 18-19, 19-23, 19-22, 19-21, 19-20, 20-23, 20-22, 20-21, 21-23, 21-22, 22-23) contiguous nucleotides differing by no more than 3 (e.g., 0, 1, 2, or 3) nucleotides from the nucleotide sequence of the sense strand set forth in SEQ ID NO: 792. In some embodiments, the antisense strand comprises from about 19-23 (e.g., 19-22, 19-21, 19-20, 20-23, 20-22, 20-21, 21-23, 21-22, 22-23) contiguous nucleotides differing by no more than 3 (e.g., 0, 1, 2, or 3) nucleotides from the nucleotide sequence of the antisense strand set forth in SEQ ID NO: 1189; and the sense strand comprises from about 19-23 (e.g., 19-22, 19-21, 19-20, 20-23, 20-22, 20-21, 21-23, 21-22, 22-23) contiguous nucleotides differing by no more than 3 (e.g., 0, 1, 2, or 3) nucleotides from the nucleotide sequence of the sense strand set forth in SEQ ID NO: 792. In some embodiments, the antisense strand comprises from about from about 21-23 (e.g., 21-22, 22-23) contiguous nucleotides differing by no more than 3 (e.g., 0, 1, 2, or 3) nucleotides from the nucleotide sequence of the antisense strand set forth in SEQ ID NO: 1189; and the sense strand comprises from about 19-23 (e.g., 19-22, 19-21, 19-20, 20-23, 20-22, 20-21, 21-23, 21-22, 22-23) contiguous nucleotides differing by no more than 3 (e.g., 0, 1, 2, or 3) nucleotides from the nucleotide sequence of the sense strand set forth in SEQ ID NO: 792. In some embodiments, the antisense strand comprises from about 21-23 (e.g., 21-22, 22-23) contiguous nucleotides differing by no more than 3 (e.g., 0, 1, 2, or 3) nucleotides from the nucleotide sequence of the antisense strand set forth in SEQ ID NO: 1189; and the sense strand comprises from about 21-23 (e.g., 21-22, 22-23) contiguous nucleotides differing by no more than 3 (e.g., 0, 1, 2, or 3) nucleotides from the nucleotide sequence of the sense strand set forth in SEQ ID NO: 792.

[0561] In some embodiments, the antisense strand comprises about 15, 16, 17, 18, 19, 20, 21, 22, 23, 24, 25, 26, 27, 28, 29, or 30 (e.g., 19, 20, 21, 22, 23 (e.g., 23)) contiguous nucleotides differing by no more than 3 (e.g., 0, 1, 2, or 3) nucleotides from the nucleotide sequence of the antisense strand set forth in SEQ ID NO: 1189; and the sense strand comprises about 15, 16, 17, 18, 19, 20, 21, 22, 23, 24, 25, 26, 27, 28, 29, or 30 (e.g., 19, 20, 21, 22, 23 (e.g., 21)) contiguous nucleotides differing by no more than 3 (e.g., 0, 1, 2, or 3) nucleotides from the nucleotide sequence of the sense strand set forth in SEQ ID NO: 792. In some embodiments, the antisense strand comprises about 19, 20, 21, 22, 23, 24, 25, 26, 27, 28, 29, 30 (e.g., 19, 20, 21, 22, 23 (e.g., 23)) contiguous nucleotides differing by no more than 3 (e.g., 0, 1, 2, or 3) nucleotides from the nucleotide sequence of the antisense strand set forth in SEQ ID NO: 1189; and the sense strand comprises 19, 20, 21, 22, 23, 24, 25, 26, 27, 28, 29, 30 (e.g., 19, 20, 21, 22, 23 (e.g., 21)) contiguous nucleotides differing by no more than 3 (e.g., 0, 1, 2, or 3) nucleotides from the nucleotide sequence of the sense strand set forth in SEQ ID NO: 792. In some embodiments, the antisense strand comprises about 21, 22, 23, 24, 25, 26, 27, 28, 29, 30 (e.g., 21, 22, 23 (e.g., 23)) contiguous nucleotides differing by no more than 3 (e.g., 0, 1, 2, or 3) nucleotides from the nucleotide sequence of the antisense strand set forth in SEQ ID NO: 1189; and the sense strand about 19, 20, 21, 22, 23, 24, 25, 26, 27, 28, 29, 30 (e.g., 19, 20, 21, 22, 23 (e.g., 21)) contiguous nucleotides differing by no more than 3 (e.g., 0, 1, 2, or 3) nucleotides from the nucleotide sequence of the sense strand set forth in SEQ ID NO: 792. In some embodiments, the antisense strand comprises about 21, 22, 23, 24, 25, 26, 27, 28, 29, 30 (e.g., 21, 22, 23 (e.g., 23)) contiguous nucleotides differing by no more than 3 (e.g., 0, 1, 2, or 3) nucleotides from the nucleotide sequence of the antisense strand set forth in SEQ ID NO: 1189; and the sense strand comprises about 21, 22, 23, 24, 25, 26, 27, 28, 29, 30 (e.g., 21, 22, 23 (e.g., 21)) contiguous nucleotides differing by no more than 3 (e.g., 0, 1, 2, or 3) nucleotides from the nucleotide sequence of the sense strand set forth in SEQ ID NO: 792. In some embodiments, the antisense strand comprises about 23, 24, 25, 26, 27, 28, 29, 30 (e.g., 23) contiguous nucleotides differing by no more than 3 (e.g., 0, 1, 2, or 3) nucleotides from the nucleotide sequence of the antisense strand set forth in SEQ ID NO: 1189; and the sense strand comprises about 21, 22, 23, 24, 25, 26, 27, 28, 29, 30 (e.g., 21, 22, 23 (e.g., 21)) contiguous nucleotides differing by no more than 3 (e.g., 0, 1, 2, or 3) nucleotides from the nucleotide sequence of the sense strand set forth in SEQ ID NO: 792. In some embodiments, the antisense strand comprises about 23 contiguous nucleotides differing by no more than 3 (e.g., 0, 1, 2, or 3) nucleotides from the nucleotide sequence of the antisense strand set forth in SEQ ID NO: 1189; and the sense strand comprises about 21 contiguous nucleotides differing by no more than 3 (e.g., 0, 1, 2, or 3) nucleotides from the nucleotide sequence of the sense strand set forth in SEQ ID NO: 792. In some embodiments, the antisense strand comprises about 21 contiguous nucleotides differing by no more than 3 (e.g., 0, 1, 2, or 3) nucleotides from the nucleotide sequence of the antisense strand set forth in SEQ ID NO: 1189; and the sense strand comprises about 19 contiguous nucleotides differing by no more than 3 (e.g., 0, 1, 2, or 3) nucleotides from the nucleotide sequence of the sense strand set forth in SEQ ID NO: 792.

[0562] In some embodiments, the nucleotide sequence of the antisense strand comprises the nucleotide sequence of the antisense strand set forth in SEQ ID NO: 1189 differing by no more than 3 (e.g., 0, 1, 2, or 3) nucleotides from the nucleotide sequence of the antisense strand set forth in SEQ ID NO: 1189; and the nucleotide sequence of the sense strand comprises the nucleotide sequence of the sense strand set forth in SEQ ID NO: 792 differing by no more than 3 (e.g., 0, 1, 2, or 3) nucleotides from the sense strand set forth in SEQ ID NO: 792.

[0563] In some embodiments, the nucleotide sequence of the antisense strand comprises the nucleotide sequence of antisense strand set forth in SEQ ID NO: 1189; and the nucleotide sequence of the sense strand comprises the nucleotide sequence of the sense strand set forth in SEQ ID NO: 792.

[0564] In some embodiments, the antisense strand consists of about 15, 16, 17, 18, 19, 20, 21, 22, 23, 24, 25, 26, 27, 28, 29, or 30 (e.g., 19, 20, 21, 22, 23 (e.g., 23)) contiguous nucleotides differing by no more than 3 (e.g., 0, 1, 2, or 3) nucleotides from the nucleotide sequence of the antisense strand set forth in SEQ ID NO: 1189; and the sense strand consists of about 15, 16, 17, 18, 19, 20, 21, 22, 23, 24, 25, 26, 27, 28, 29, or 30 (e.g., 19, 20, 21, 22, 23 (e.g., 21)) contiguous nucleotides differing by no more than 3 (e.g., 0, 1, 2, or 3) nucleotides from the nucleotide sequence of the sense strand set forth in SEQ ID NO: 792. In some embodiments, the antisense strand consists of about 19, 20, 21, 22, 23, 24, 25, 26, 27, 28, 29, 30 (e.g., 19, 20, 21, 22, 23 (e.g., 23)) contiguous nucleotides differing by no more than 3 (e.g., 0, 1, 2, or 3) nucleotides from the nucleotide sequence of the antisense strand set forth in SEQ ID NO: 1189; and the sense strand consists of 19, 20, 21, 22, 23, 24, 25, 26, 27, 28, 29, 30 (e.g., 19, 20, 21, 22, 23 (e.g., 21)) contiguous nucleotides differing by no more than 3 (e.g., 0, 1, 2, or 3) nucleotides from the nucleotide sequence of the sense strand set forth in SEQ ID NO: 792. In some embodiments, the antisense strand consists of about 21, 22, 23, 24, 25, 26, 27, 28, 29, 30 (e.g., 21, 22, 23 (e.g., 23)) contiguous nucleotides differing by no more than 3 (e.g., 0, 1, 2, or 3) nucleotides from the nucleotide sequence of the antisense strand set forth in SEQ ID NO: 1189; and the sense strand consists of about 19, 20, 21, 22, 23, 24, 25, 26, 27, 28, 29, 30 (e.g., 19, 20, 21, 22, 23 (e.g., 21)) contiguous nucleotides differing by no more than 3 (e.g., 0, 1, 2, or 3) nucleotides from the nucleotide sequence of the sense strand set forth in SEQ ID NO: 792. In some embodiments, the antisense strand consists of about 21, 22, 23, 24, 25, 26, 27, 28, 29, 30 (e.g., 21, 22, 23 (e.g., 23)) contiguous nucleotides differing by no more than 3 (e.g., 0, 1, 2, or 3) nucleotides from the nucleotide sequence of the antisense strand set forth in SEQ ID NO: 1189; and the sense strand consists of at about 21, 22, 23, 24, 25, 26, 27, 28, 29, 30 (e.g., 21, 22, 23 (e.g., 21)) contiguous nucleotides differing by no more than 3 (e.g., 0, 1, 2, or 3) nucleotides from the nucleotide sequence of the sense strand set forth in SEQ ID NO: 792. In some embodiments, the antisense strand consists of about 23, 24, 25, 26, 27, 28, 29, 30 (e.g., 23) contiguous nucleotides differing by no more than 3 (e.g., 0, 1, 2, or 3) nucleotides from the nucleotide sequence of the antisense strand set forth in SEQ ID NO: 1189; and the sense strand consists of about 21, 22, 23, 24, 25, 26, 27, 28, 29, 30 (e.g., 21, 22, 23 (e.g., 21)) contiguous nucleotides differing by no more than 3 (e.g., 0, 1, 2, or 3) nucleotides from the nucleotide sequence of the sense strand set forth in SEQ ID NO: 792. In some embodiments, the antisense strand consists of about 23 contiguous nucleotides differing by no more than 3 (e.g., 0, 1, 2, or 3) nucleotides from the nucleotide sequence of the antisense strand set forth in SEQ ID NO: 1189; and the sense strand consists of about 21 contiguous nucleotides differing by no more than 3 (e.g., 0, 1, 2, or 3) nucleotides from the nucleotide sequence of the sense strand set forth in SEQ ID NO: 792. In some embodiments, the antisense strand consists of about 21 contiguous nucleotides differing by no more than 3 (e.g., 0, 1, 2, or 3) nucleotides from the nucleotide sequence of the antisense strand set forth in SEQ ID NO: 1189; and the sense strand consists of about 19 contiguous nucleotides differing by no more than 3 (e.g., 0, 1, 2, or 3) nucleotides from the nucleotide sequence of the sense strand set forth in SEQ ID NO: 792.

[0565] In some embodiments, the nucleotide sequence of the antisense strand consists of the nucleotide sequence of the antisense strand set forth in SEQ ID NO: 1189 differing by no more than 3 (e.g., 0, 1, 2, or 3) nucleotides from the nucleotide sequence of the antisense strand set forth in SEQ ID NO: 1189; and the nucleotide sequence of the sense strand consists of the nucleotide sequence of the sense strand set forth in SEQ ID NO: 792 differing by no more than 3 (e.g., 0, 1, 2, or 3) nucleotides from the sense strand set forth in SEQ ID NO: 792.

[0566] In some embodiments, the nucleotide sequence of the antisense strand consists of the nucleotide sequence of antisense strand set forth in SEQ ID NO: 1189; and the nucleotide sequence of the sense strand consists of the nucleotide sequence of the sense strand set forth in SEQ ID NO: 792.

[0567] In some embodiments, the nucleotide sequence of the antisense strand differs by no more than 5 (e.g., 0, 1, 2, 3, 4, or 5) nucleotides from the nucleotide sequence set forth in SEQ ID NO: 1191; and the nucleotide sequence of the sense strand differs by no more than 5 (e.g., 0, 1, 2, 3, 4, or 5) nucleotides from the nucleotide sequence set forth in SEQ ID NO: 1192. In some embodiments, the nucleotide sequence of the antisense strand differs by no more than 3 (e.g., 0, 1, 2, or 3) nucleotides from the nucleotide sequence set forth in SEQ ID NO: 1191; and the nucleotide sequence of the sense strand differs by no more than 3 (e.g., 0, 1, 2, or 3) nucleotides from the nucleotide sequence set forth in SEQ ID NO: 1192. In some embodiments, the nucleotide sequence of the antisense strand differs by no more than 2 (e.g., 0, 1, or 2) nucleotides from the nucleotide sequence set forth in SEQ ID NO: 1191; and the nucleotide sequence of the sense strand differs by no more than 2 (e.g., 0, 1, or 2) nucleotides from the nucleotide sequence set forth in SEQ ID NO: 1192. In some embodiments, the nucleotide sequence of the antisense strand differs by no more than 1 (e.g., 0 or 1) nucleotide from the nucleotide sequence set forth in SEQ ID NO: 1191; and the nucleotide sequence of the sense strand differs by no more than 1 (e.g., 0 or 1) nucleotide from the nucleotide sequence set forth in SEQ ID NO: 1192.

[0568] In some embodiments, the nucleotide sequence of the antisense strand comprises the nucleotide sequence set forth in SEQ ID NO: 1191 differing by no more than 5 (e.g., 0, 1, 2, 3, 4, or 5) nucleotides from the nucleotide sequence set forth in SEQ ID NO: 1191; and the nucleotide sequence of the sense strand comprises the nucleotide sequence set forth in SEQ ID NO: 1191 differing by no more than 5 (e.g., 0, 1, 2, 3, 4, or 5) nucleotides from the nucleotide sequence set forth in SEQ ID NO: 1192. In some embodiments, the nucleotide sequence of the antisense strand comprises the nucleotide sequence set forth in SEQ ID NO: 1191 differing by no more than 3 (e.g., 0, 1, 2, or 3) nucleotides from the nucleotide sequence set forth in SEQ ID NO: 1191; and the nucleotide sequence of the sense strand comprises the nucleotide sequence set forth in SEQ ID NO: 1192 differing by no more than 3 (e.g., 0, 1, 2, or 3) nucleotides from the nucleotide sequence set forth in SEQ ID NO: 1192. In some embodiments, the nucleotide sequence of the antisense strand comprises the nucleotide sequence set forth in SEQ ID NO: 1191 differing by no more than 2 (e.g., 0, 1, or 2) nucleotides from the nucleotide sequence set forth in SEQ ID NO: 1191; and the nucleotide sequence of the sense strand comprises the nucleotide sequence set forth in SEQ ID NO: 1192 differing by no more than 2 (e.g., 0, 1, or 2) nucleotides from the nucleotide sequence set forth in SEQ ID NO: 1192. In some embodiments, the nucleotide sequence of the antisense strand comprises the nucleotide sequence set forth in SEQ ID NO: 1191 differing by no more than 1 (e.g., 0 or 1) nucleotide from nucleotide sequence set forth in SEQ ID NO: 1191; and the nucleotide sequence of the sense strand comprises the nucleotide sequence set forth in SEQ ID NO: 1192 differing by no more than 1 (e.g., 0 or 1) nucleotide from nucleotide sequence set forth in SEQ ID NO: 1192.

[0569] In some embodiments, the nucleotide sequence of the antisense strand is at least 85%, 86%, 87%, 88%, 89%, 90%, 91%, 92%, 93%, 94%, 95%, 96%, 97%, 98%, 99% or 100% identical to the nucleotide sequence set forth in SEQ ID NO: 1191; and the nucleotide sequence of the sense strand is at least 85%, 86%, 87%, 88%, 89%, 90%, 91%, 92%, 93%, 94%, 95%, 96%, 97%, 98%, 99% or 100% identical to the nucleotide sequence set forth in SEQ ID NO: 1192. In some embodiments, the nucleotide sequence of the antisense strand is at least 90%, 91%, 92%, 93%, 94%, 95%, 96%, 97%, 98%, 99% or 100% identical to the nucleotide sequence set forth in SEQ ID NO: 1191; and the nucleotide sequence of the sense strand is at least 90%, 91%, 92%, 93%, 94%, 95%, 96%, 97%, 98%, 99% or 100% identical to the nucleotide sequence set forth in SEQ ID NO: 1192. In some embodiments, the nucleotide sequence of the antisense strand is at least 95%, 96%, 97%, 98%, 99% or 100% identical to the nucleotide sequence set forth in SEQ ID NO: 1191; and the nucleotide sequence of the sense strand is at least 95%, 96%, 97%, 98%, 99% or 100% identical to the nucleotide sequence set forth in SEQ ID NO: 1192. In some embodiments, the nucleotide sequence of the antisense strand is at least 96%, 97%, 98%, 99% or 100% identical to the nucleotide sequence set forth in SEQ ID NO: 1191; and the nucleotide sequence of the sense strand is at least 96%, 97%, 98%, 99% or 100% identical to the nucleotide sequence set forth in SEQ ID NO: 1192. In some embodiments, the nucleotide sequence of the antisense strand is at least 97%, identical to the nucleotide sequence set forth in SEQ ID NO: 1191; and the nucleotide sequence of the sense strand is at least 97%, identical to the nucleotide sequence set forth in SEQ ID NO: 1192. In some embodiments, the nucleotide sequence of the antisense strand is at least 98% identical to the nucleotide sequence set forth in SEQ ID NO: 1191; and the nucleotide sequence of the sense strand is at least 98% identical to the nucleotide sequence set forth in SEQ ID NO: 1192. In some embodiments, the nucleotide sequence of the antisense strand is at least 99% identical to the nucleotide sequence set forth in SEQ ID NO: 1191; and the nucleotide sequence of the sense strand is at least 99% identical to the nucleotide sequence set forth in SEQ ID NO: 1192. In some embodiments, the nucleotide sequence of the antisense strand is 100% identical to the nucleotide sequence set forth in SEQ ID NO: 1191; and the nucleotide sequence of the sense strand is 100% identical to the nucleotide sequence set forth in SEQ ID NO: 1192.

[0570] In some embodiments, the nucleotide sequence of the antisense strand comprises the nucleotide sequence set forth in SEQ ID NO: 1191; and the nucleotide sequence of the sense strand comprises the nucleotide sequence set forth in SEQ ID NO: 1192. In some embodiments, the nucleotide sequence of the antisense strand consists of the nucleotide sequence set forth in SEQ ID NO: 1191; and the nucleotide sequence of the sense strand consists of the nucleotide sequence set forth in SEQ ID NO: 1192.

[0571] In some embodiments, the antisense strand comprises at least 15 (e.g., 15, 16, 17, 18, 19, 20, 21, 22, 23, 24, 25, 26, 27, 28, 29, 30 (e.g., 19, 20, 21, 22, 23 (e.g., 23))) contiguous nucleotides differing by no more than 3 (e.g., 0, 1, 2, or 3) nucleotides from the nucleotide sequence of the antisense strand set forth in SEQ ID NO: 1191; and the sense strand comprises at least 15 (e.g., 15, 16, 17, 18, 19, 20, 21, 22, 23, 24, 25, 26, 27, 28, 29, 30 (e.g., 19, 20, 21, 22, 23 (e.g., 21))) contiguous nucleotides differing by no more than 3 (e.g., 0, 1, 2, or 3) nucleotides from the nucleotide sequence of the sense strand set forth in SEQ ID NO: 1192. In some embodiments, the antisense strand comprises at least 19 (e.g., 20, 21, 22, 23, 24, 25, 26, 27, 28, 29, 30 (e.g., 19, 20, 21, 22, 23 (e.g., 23))) contiguous nucleotides differing by no more than 3 (e.g., 0, 1, 2, or 3) nucleotides from the nucleotide sequence of the antisense strand set forth in SEQ ID NO: 1191; and the sense strand comprises at least 19 (e.g., 20, 21, 22, 23, 24, 25, 26, 27, 28, 29, 30 (e.g., 19, 20, 21, 22, 23 (e.g., 21))) contiguous nucleotides differing by no more than 3 (e.g., 0, 1, 2, or 3) nucleotides from the nucleotide sequence of the sense strand set forth in SEQ ID NO: 1192. In some embodiments, the antisense strand comprises at least 21 (e.g., 22, 23, 24, 25, 26, 27, 28, 29, 30 (e.g., 21, 22, 23 (e.g., 23))) contiguous nucleotides differing by no more than 3 (e.g., 0, 1, 2, or 3) nucleotides from the nucleotide sequence of the antisense strand set forth in SEQ ID NO: 1191; and the sense strand comprises at least 19 (e.g., 20, 21, 22, 23, 24, 25, 26, 27, 28, 29, 30 (e.g., 19, 20, 21, 22, 23 (e.g., 21))) contiguous nucleotides differing by no more than 3 (e.g., 0, 1, 2, or 3) nucleotides from the nucleotide sequence of the sense strand set forth in SEQ ID NO: 1192. In some embodiments, the antisense strand comprises at least 21 (e.g., 22, 23, 24, 25, 26, 27, 28, 29, 30 (e.g., 21, 22, 23 (e.g., 23))) contiguous nucleotides differing by no more than 3 (e.g., 0, 1, 2, or 3) nucleotides from the nucleotide sequence of the antisense strand set forth in SEQ ID NO: 1191; and the sense strand comprises at least 21 (e.g., 22, 23, 24, 25, 26, 27, 28, 29, 30 (e.g., 21, 22, 23 (e.g., 21))) contiguous nucleotides differing by no more than 3 (e.g., 0, 1, 2, or 3) nucleotides from the nucleotide sequence of the sense strand set forth in SEQ ID NO: 1192. In some embodiments, the antisense strand comprises at least 23 (e.g., 24, 25, 26, 27, 28, 29, 30 (e.g., 23)) contiguous nucleotides differing by no more than 3 (e.g., 0, 1, 2, or 3) nucleotides from the nucleotide sequence of the antisense strand set forth in SEQ ID NO: 1191; and the sense strand comprises at least 21 (e.g., 22, 23, 24, 25, 26, 27, 28, 29, 30 (e.g., 21, 22, 23 (e.g., 21))) contiguous nucleotides differing by no more than 3 (e.g., 0, 1, 2, or 3) nucleotides from the nucleotide sequence of the sense strand set forth in SEQ ID NO: 1192.

[0572] In some embodiments, the antisense strand comprises from about 15-23 (e.g., 15-22, 15-21, 15-20, 15-19, 15-18, 15-17, 15-16, 16-22, 16-20, 16-19, 16-18, 16-17, 17-23, 17-22, 17-21, 17-20, 17-19, 17-18, 18-23, 18-22, 18-21, 18-20, 18-19, 19-23, 19-22, 19-21, 19-20, 20-23, 20-22, 20-21, 21-23, 21-22, 22-23) contiguous nucleotides differing by no more than 3 (e.g., 0, 1, 2, or 3) nucleotides from the nucleotide sequence of the antisense strand set forth in SEQ ID NO: 1191; and the sense strand comprises from about 15-23 (e.g., 15-22, 15-21, 15-20, 15-19, 15-18, 15-17, 15-16, 16-22, 16-20, 16-19, 16-18, 16-17, 17-23, 17-22, 17-21, 17-20, 17-19, 17-18, 18-23, 18-22, 18-21, 18-20, 18-19, 19-23, 19-22, 19-21, 19-20, 20-23, 20-22, 20-21, 21-23, 21-22, 22-23) contiguous nucleotides differing by no more than 3 (e.g., 0, 1, 2, or 3) nucleotides from the nucleotide sequence of the sense strand set forth in SEQ ID NO: 1192. In some embodiments, the antisense strand comprises from about 19-23 (e.g., 19-22, 19-21, 19-20, 20-23, 20-22, 20-21, 21-23, 21-22, 22-23) contiguous nucleotides differing by no more than 3 (e.g., 0, 1, 2, or 3) nucleotides from the nucleotide sequence of the antisense strand set forth in SEQ ID NO: 1191; and the sense strand comprises from about 19-23 (e.g., 19-22, 19-21, 19-20, 20-23, 20-22, 20-21, 21-23, 21-22, 22-23) contiguous nucleotides differing by no more than 3 (e.g., 0, 1, 2, or 3) nucleotides from the nucleotide sequence of the sense strand set forth in SEQ ID NO: 1192. In some embodiments, the antisense strand comprises from about from about 21-23 (e.g., 21-22, 22-23) contiguous nucleotides differing by no more than 3 (e.g., 0, 1, 2, or 3) nucleotides from the nucleotide sequence of the antisense strand set forth in SEQ ID NO: 1191; and the sense strand comprises from about 19-23 (e.g., 19-22, 19-21, 19-20, 20-23, 20-22, 20-21, 21-23, 21-22, 22-23) contiguous nucleotides differing by no more than 3 (e.g., 0, 1, 2, or 3) nucleotides from the nucleotide sequence of the sense strand set forth in SEQ ID NO: 1192. In some embodiments, the antisense strand comprises from about 21-23 (e.g., 21-22, 22-23) contiguous nucleotides differing by no more than 3 (e.g., 0, 1, 2, or 3) nucleotides from the nucleotide sequence of the antisense strand set forth in SEQ ID NO: 1191; and the sense strand comprises from about 21-23 (e.g., 21-22, 22-23) contiguous nucleotides differing by no more than 3 (e.g., 0, 1, 2, or 3) nucleotides from the nucleotide sequence of the sense strand set forth in SEQ ID NO: 1192.

[0573] In some embodiments, the antisense strand comprises about 15, 16, 17, 18, 19, 20, 21, 22, 23, 24, 25, 26, 27, 28, 29, or 30 (e.g., 19, 20, 21, 22, 23 (e.g., 23)) contiguous nucleotides differing by no more than 3 (e.g., 0, 1, 2, or 3) nucleotides from the nucleotide sequence of the antisense strand set forth in SEQ ID NO: 1191; and the sense strand comprises about 15, 16, 17, 18, 19, 20, 21, 22, 23, 24, 25, 26, 27, 28, 29, or 30 (e.g., 19, 20, 21, 22, 23 (e.g., 21)) contiguous nucleotides differing by no more than 3 (e.g., 0, 1, 2, or 3) nucleotides from the nucleotide sequence of the sense strand set forth in SEQ ID NO: 1192. In some embodiments, the antisense strand comprises about 19, 20, 21, 22, 23, 24, 25, 26, 27, 28, 29, 30 (e.g., 19, 20, 21, 22, 23 (e.g., 23)) contiguous nucleotides differing by no more than 3 (e.g., 0, 1, 2, or 3) nucleotides from the nucleotide sequence of the antisense strand set forth in SEQ ID NO: 1191; and the sense strand comprises 19, 20, 21, 22, 23, 24, 25, 26, 27, 28, 29, 30 (e.g., 19, 20, 21, 22, 23 (e.g., 21)) contiguous nucleotides differing by no more than 3 (e.g., 0, 1, 2, or 3) nucleotides from the nucleotide sequence of the sense strand set forth in SEQ ID NO: 1192. In some embodiments, the antisense strand comprises about 21, 22, 23, 24, 25, 26, 27, 28, 29, 30 (e.g., 21, 22, 23 (e.g., 23)) contiguous nucleotides differing by no more than 3 (e.g., 0, 1, 2, or 3) nucleotides from the nucleotide sequence of the antisense strand set forth in SEQ ID NO: 1191; and the sense strand about 19, 20, 21, 22, 23, 24, 25, 26, 27, 28, 29, 30 (e.g., 19, 20, 21, 22, 23 (e.g., 21)) contiguous nucleotides differing by no more than 3 (e.g., 0, 1, 2, or 3) nucleotides from the nucleotide sequence of the sense strand set forth in SEQ ID NO: 1192. In some embodiments, the antisense strand comprises about 21, 22, 23, 24, 25, 26, 27, 28, 29, 30 (e.g., 21, 22, 23 (e.g., 23)) contiguous nucleotides differing by no more than 3 (e.g., 0, 1, 2, or 3) nucleotides from the nucleotide sequence of the antisense strand set forth in SEQ ID NO: 1191; and the sense strand comprises about 21, 22, 23, 24, 25, 26, 27, 28, 29, 30 (e.g., 21, 22, 23 (e.g., 21)) contiguous nucleotides differing by no more than 3 (e.g., 0, 1, 2, or 3) nucleotides from the nucleotide sequence of the sense strand set forth in SEQ ID NO: 1192. In some embodiments, the antisense strand comprises about 23, 24, 25, 26, 27, 28, 29, 30 (e.g., 23) contiguous nucleotides differing by no more than 3 (e.g., 0, 1, 2, or 3) nucleotides from the nucleotide sequence of the antisense strand set forth in SEQ ID NO: 1191; and the sense strand comprises about 21, 22, 23, 24, 25, 26, 27, 28, 29, 30 (e.g., 21, 22, 23 (e.g., 21)) contiguous nucleotides differing by no more than 3 (e.g., 0, 1, 2, or 3) nucleotides from the nucleotide sequence of the sense strand set forth in SEQ ID NO: 1192. In some embodiments, the antisense strand comprises about 23 contiguous nucleotides differing by no more than 3 (e.g., 0, 1, 2, or 3) nucleotides from the nucleotide sequence of the antisense strand set forth in SEQ ID NO: 1191; and the sense strand comprises about 21 contiguous nucleotides differing by no more than 3 (e.g., 0, 1, 2, or 3) nucleotides from the nucleotide sequence of the sense strand set forth in SEQ ID NO: 1192. In some embodiments, the antisense strand comprises about 21 contiguous nucleotides differing by no more than 3 (e.g., 0, 1, 2, or 3) nucleotides from the nucleotide sequence of the antisense strand set forth in SEQ ID NO: 1191; and the sense strand comprises about 19 contiguous nucleotides differing by no more than 3 (e.g., 0, 1, 2, or 3) nucleotides from the nucleotide sequence of the sense strand set forth in SEQ ID NO: 1192.

[0574] In some embodiments, the nucleotide sequence of the antisense strand comprises the nucleotide sequence of the antisense strand set forth in SEQ ID NO: 1191 differing by no more than 3 (e.g., 0, 1, 2, or 3) nucleotides from the nucleotide sequence of the antisense strand set forth in SEQ ID NO: 1191; and the nucleotide sequence of the sense strand comprises the nucleotide sequence of the sense strand set forth in SEQ ID NO: 1192 differing by no more than 3 (e.g., 0, 1, 2, or 3) nucleotides from the sense strand set forth in SEQ ID NO: 1192.

[0575] In some embodiments, the nucleotide sequence of the antisense strand comprises the nucleotide sequence of antisense strand set forth in SEQ ID NO: 1191; and the nucleotide sequence of the sense strand comprises the nucleotide sequence of the sense strand set forth in SEQ ID NO: 1192.

[0576] In some embodiments, the antisense strand consists of about 15, 16, 17, 18, 19, 20, 21, 22, 23, 24, 25, 26, 27, 28, 29, or 30 (e.g., 19, 20, 21, 22, 23 (e.g., 23)) contiguous nucleotides differing by no more than 3 (e.g., 0, 1, 2, or 3) nucleotides from the nucleotide sequence of the antisense strand set forth in SEQ ID NO: 1191; and the sense strand consists of about 15, 16, 17, 18, 19, 20, 21, 22, 23, 24, 25, 26, 27, 28, 29, or 30 (e.g., 19, 20, 21, 22, 23 (e.g., 21)) contiguous nucleotides differing by no more than 3 (e.g., 0, 1, 2, or 3) nucleotides from the nucleotide sequence of the sense strand set forth in SEQ ID NO: 1192. In some embodiments, the antisense strand consists of about 19, 20, 21, 22, 23, 24, 25, 26, 27, 28, 29, 30 (e.g., 19, 20, 21, 22, 23 (e.g., 23)) contiguous nucleotides differing by no more than 3 (e.g., 0, 1, 2, or 3) nucleotides from the nucleotide sequence of the antisense strand set forth in SEQ ID NO: 1191; and the sense strand consists of 19, 20, 21, 22, 23, 24, 25, 26, 27, 28, 29, 30 (e.g., 19, 20, 21, 22, 23 (e.g., 21)) contiguous nucleotides differing by no more than 3 (e.g., 0, 1, 2, or 3) nucleotides from the nucleotide sequence of the sense strand set forth in SEQ ID NO: 1192. In some embodiments, the antisense strand consists of about 21, 22, 23, 24, 25, 26, 27, 28, 29, 30 (e.g., 21, 22, 23 (e.g., 23)) contiguous nucleotides differing by no more than 3 (e.g., 0, 1, 2, or 3) nucleotides from the nucleotide sequence of the antisense strand set forth in SEQ ID NO: 1191; and the sense strand consists of about 19, 20, 21, 22, 23, 24, 25, 26, 27, 28, 29, 30 (e.g., 19, 20, 21, 22, 23 (e.g., 21)) contiguous nucleotides differing by no more than 3 (e.g., 0, 1, 2, or 3) nucleotides from the nucleotide sequence of the sense strand set forth in SEQ ID NO: 1192. In some embodiments, the antisense strand consists of about 21, 22, 23, 24, 25, 26, 27, 28, 29, 30 (e.g., 21, 22, 23 (e.g., 23)) contiguous nucleotides differing by no more than 3 (e.g., 0, 1, 2, or 3) nucleotides from the nucleotide sequence of the antisense strand set forth in SEQ ID NO: 1191; and the sense strand consists of at about 21, 22, 23, 24, 25, 26, 27, 28, 29, 30 (e.g., 21, 22, 23 (e.g., 21)) contiguous nucleotides differing by no more than 3 (e.g., 0, 1, 2, or 3) nucleotides from the nucleotide sequence of the sense strand set forth in SEQ ID NO: 1192. In some embodiments, the antisense strand consists of about 23, 24, 25, 26, 27, 28, 29, 30 (e.g., 23) contiguous nucleotides differing by no more than 3 (e.g., 0, 1, 2, or 3) nucleotides from the nucleotide sequence of the antisense strand set forth in SEQ ID NO: 1191; and the sense strand consists of about 21, 22, 23, 24, 25, 26, 27, 28, 29, 30 (e.g., 21, 22, 23 (e.g., 21)) contiguous nucleotides differing by no more than 3 (e.g., 0, 1, 2, or 3) nucleotides from the nucleotide sequence of the sense strand set forth in SEQ ID NO: 1192. In some embodiments, the antisense strand consists of about 23 contiguous nucleotides differing by no more than 3 (e.g., 0, 1, 2, or 3) nucleotides from the nucleotide sequence of the antisense strand set forth in SEQ ID NO: 1191; and the sense strand consists of about 21 contiguous nucleotides differing by no more than 3 (e.g., 0, 1, 2, or 3) nucleotides from the nucleotide sequence of the sense strand set forth in SEQ ID NO: 1192. In some embodiments, the antisense strand consists of about 21 contiguous nucleotides differing by no more than 3 (e.g., 0, 1, 2, or 3) nucleotides from the nucleotide sequence of the antisense strand set forth in SEQ ID NO: 1191; and the sense strand consists of about 19 contiguous nucleotides differing by no more than 3 (e.g., 0, 1, 2, or 3) nucleotides from the nucleotide sequence of the sense strand set forth in SEQ ID NO: 1192.

[0577] In some embodiments, the nucleotide sequence of the antisense strand consists of the nucleotide sequence of the antisense strand set forth in SEQ ID NO: 1191 differing by no more than 3 (e.g., 0, 1, 2, or 3) nucleotides from the nucleotide sequence of the antisense strand set forth in SEQ ID NO: 1191; and the nucleotide sequence of the sense strand consists of the nucleotide sequence of the sense strand set forth in SEQ ID NO: 1192 differing by no more than 3 (e.g., 0, 1, 2, or 3) nucleotides from the sense strand set forth in SEQ ID NO: 1192.

[0578] In some embodiments, the nucleotide sequence of the antisense strand consists of the nucleotide sequence of antisense strand set forth in SEQ ID NO: 1191; and the nucleotide sequence of the sense strand consists of the nucleotide sequence of the sense strand set forth in SEQ ID NO: 1192.

[0579] In some embodiments, the nucleotide sequence of the antisense strand differs by no more than 5 (e.g., 0, 1, 2, 3, 4, or 5) nucleotides from the nucleotide sequence set forth in SEQ ID NO: 1190; and the nucleotide sequence of the sense strand differs by no more than 5 (e.g., 0, 1, 2, 3, 4, or 5) nucleotides from the nucleotide sequence set forth in SEQ ID NO: 786. In some embodiments, the nucleotide sequence of the antisense strand differs by no more than 3 (e.g., 0, 1, 2, or 3) nucleotides from the nucleotide sequence set forth in SEQ ID NO: 1190; and the nucleotide sequence of the sense strand differs by no more than 3 (e.g., 0, 1, 2, or 3) nucleotides from the nucleotide sequence set forth in SEQ ID NO: 786. In some embodiments, the nucleotide sequence of the antisense strand differs by no more than 2 (e.g., 0, 1, or 2) nucleotides from the nucleotide sequence set forth in SEQ ID NO: 1190; and the nucleotide sequence of the sense strand differs by no more than 2 (e.g., 0, 1, or 2) nucleotides from the nucleotide sequence set forth in SEQ ID NO: 786. In some embodiments, the nucleotide sequence of the antisense strand differs by no more than 1 (e.g., 0 or 1) nucleotide from the nucleotide sequence set forth in SEQ ID NO: 1190; and the nucleotide sequence of the sense strand differs by no more than 1 (e.g., 0 or 1) nucleotide from the nucleotide sequence set forth in SEQ ID NO: 786.

[0580] In some embodiments, the nucleotide sequence of the antisense strand comprises the nucleotide sequence set forth in SEQ ID NO: 1190 differing by no more than 5 (e.g., 0, 1, 2, 3, 4, or 5) nucleotides from the nucleotide sequence set forth in SEQ ID NO: 1190; and the nucleotide sequence of the sense strand comprises the nucleotide sequence set forth in SEQ ID NO: 1190 differing by no more than 5 (e.g., 0, 1, 2, 3, 4, or 5) nucleotides from the nucleotide sequence set forth in SEQ ID NO: 786. In some embodiments, the nucleotide sequence of the antisense strand comprises the nucleotide sequence set forth in SEQ ID NO: 1190 differing by no more than 3 (e.g., 0, 1, 2, or 3) nucleotides from the nucleotide sequence set forth in SEQ ID NO: 1190; and the nucleotide sequence of the sense strand comprises the nucleotide sequence set forth in SEQ ID NO: 786 differing by no more than 3 (e.g., 0, 1, 2, or 3) nucleotides from the nucleotide sequence set forth in SEQ ID NO: 786. In some embodiments, the nucleotide sequence of the antisense strand comprises the nucleotide sequence set forth in SEQ ID NO: 1190 differing by no more than 2 (e.g., 0, 1, or 2) nucleotides from the nucleotide sequence set forth in SEQ ID NO: 1190; and the nucleotide sequence of the sense strand comprises the nucleotide sequence set forth in SEQ ID NO: 786 differing by no more than 2 (e.g., 0, 1, or 2) nucleotides from the nucleotide sequence set forth in SEQ ID NO: 786. In some embodiments, the nucleotide sequence of the antisense strand comprises the nucleotide sequence set forth in SEQ ID NO: 1190 differing by no more than 1 (e.g., 0 or 1) nucleotide from nucleotide sequence set forth in SEQ ID NO: 1190; and the nucleotide sequence of the sense strand comprises the nucleotide sequence set forth in SEQ ID NO: 786 differing by no more than 1 (e.g., 0 or 1) nucleotide from nucleotide sequence set forth in SEQ ID NO: 786.

[0581] In some embodiments, the nucleotide sequence of the antisense strand is at least 85%, 86%, 87%, 88%, 89%, 90%, 91%, 92%, 93%, 94%, 95%, 96%, 97%, 98%, 99% or 100% identical to the nucleotide sequence set forth in SEQ ID NO: 1190; and the nucleotide sequence of the sense strand is at least 85%, 86%, 87%, 88%, 89%, 90%, 91%, 92%, 93%, 94%, 95%, 96%, 97%, 98%, 99% or 100% identical to the nucleotide sequence set forth in SEQ ID NO: 786. In some embodiments, the nucleotide sequence of the antisense strand is at least 90%, 91%, 92%, 93%, 94%, 95%, 96%, 97%, 98%, 99% or 100% identical to the nucleotide sequence set forth in SEQ ID NO: 1190; and the nucleotide sequence of the sense strand is at least 90%, 91%, 92%, 93%, 94%, 95%, 96%, 97%, 98%, 99% or 100% identical to the nucleotide sequence set forth in SEQ ID NO: 786. In some embodiments, the nucleotide sequence of the antisense strand is at least 95%, 96%, 97%, 98%, 99% or 100% identical to the nucleotide sequence set forth in SEQ ID NO: 1190; and the nucleotide sequence of the sense strand is at least 95%, 96%, 97%, 98%, 99% or 100% identical to the nucleotide sequence set forth in SEQ ID NO: 786. In some embodiments, the nucleotide sequence of the antisense strand is at least 96%, 97%, 98%, 99% or 100% identical to the nucleotide sequence set forth in SEQ ID NO: 1190; and the nucleotide sequence of the sense strand is at least 96%, 97%, 98%, 99% or 100% identical to the nucleotide sequence set forth in SEQ ID NO: 786. In some embodiments, the nucleotide sequence of the antisense strand is at least 97%, identical to the nucleotide sequence set forth in SEQ ID NO: 1190; and the nucleotide sequence of the sense strand is at least 97%, identical to the nucleotide sequence set forth in SEQ ID NO: 786. In some embodiments, the nucleotide sequence of the antisense strand is at least 98% identical to the nucleotide sequence set forth in SEQ ID NO: 1190; and the nucleotide sequence of the sense strand is at least 98% identical to the nucleotide sequence set forth in SEQ ID NO: 786. In some embodiments, the nucleotide sequence of the antisense strand is at least 99% identical to the nucleotide sequence set forth in SEQ ID NO: 1190; and the nucleotide sequence of the sense strand is at least 99% identical to the nucleotide sequence set forth in SEQ ID NO: 786. In some embodiments, the nucleotide sequence of the antisense strand is 100% identical to the nucleotide sequence set forth in SEQ ID NO: 1190; and the nucleotide sequence of the sense strand is 100% identical to the nucleotide sequence set forth in SEQ ID NO: 786.

[0582] In some embodiments, the nucleotide sequence of the antisense strand comprises the nucleotide sequence set forth in SEQ ID NO: 1190; and the nucleotide sequence of the sense strand comprises the nucleotide sequence set forth in SEQ ID NO: 786. In some embodiments, the nucleotide sequence of the antisense strand consists of the nucleotide sequence set forth in SEQ ID NO: 1190; and the nucleotide sequence of the sense strand consists of the nucleotide sequence set forth in SEQ ID NO: 786.

[0583] In some embodiments, the antisense strand comprises at least 15 (e.g., 15, 16, 17, 18, 19, 20, 21, 22, 23, 24, 25, 26, 27, 28, 29, 30 (e.g., 19, 20, 21, 22, 23 (e.g., 23))) contiguous nucleotides differing by no more than 3 (e.g., 0, 1, 2, or 3) nucleotides from the nucleotide sequence of the antisense strand set forth in SEQ ID NO: 1190; and the sense strand comprises at least 15 (e.g., 15, 16, 17, 18, 19, 20, 21, 22, 23, 24, 25, 26, 27, 28, 29, 30 (e.g., 19, 20, 21, 22, 23 (e.g., 21))) contiguous nucleotides differing by no more than 3 (e.g., 0, 1, 2, or 3) nucleotides from the nucleotide sequence of the sense strand set forth in SEQ ID NO: 786. In some embodiments, the antisense strand comprises at least 19 (e.g., 20, 21, 22, 23, 24, 25, 26, 27, 28, 29, 30 (e.g., 19, 20, 21, 22, 23 (e.g., 23))) contiguous nucleotides differing by no more than 3 (e.g., 0, 1, 2, or 3) nucleotides from the nucleotide sequence of the antisense strand set forth in SEQ ID NO: 1190; and the sense strand comprises at least 19 (e.g., 20, 21, 22, 23, 24, 25, 26, 27, 28, 29, 30 (e.g., 19, 20, 21, 22, 23 (e.g., 21))) contiguous nucleotides differing by no more than 3 (e.g., 0, 1, 2, or 3) nucleotides from the nucleotide sequence of the sense strand set forth in SEQ ID NO: 786. In some embodiments, the antisense strand comprises at least 21 (e.g., 22, 23, 24, 25, 26, 27, 28, 29, 30 (e.g., 21, 22, 23 (e.g., 23))) contiguous nucleotides differing by no more than 3 (e.g., 0, 1, 2, or 3) nucleotides from the nucleotide sequence of the antisense strand set forth in SEQ ID NO: 1190; and the sense strand comprises at least 19 (e.g., 20, 21, 22, 23, 24, 25, 26, 27, 28, 29, 30 (e.g., 19, 20, 21, 22, 23 (e.g., 21))) contiguous nucleotides differing by no more than 3 (e.g., 0, 1, 2, or 3) nucleotides from the nucleotide sequence of the sense strand set forth in SEQ ID NO: 786. In some embodiments, the antisense strand comprises at least 21 (e.g., 22, 23, 24, 25, 26, 27, 28, 29, 30 (e.g., 21, 22, 23 (e.g., 23))) contiguous nucleotides differing by no more than 3 (e.g., 0, 1, 2, or 3) nucleotides from the nucleotide sequence of the antisense strand set forth in SEQ ID NO: 1190; and the sense strand comprises at least 21 (e.g., 22, 23, 24, 25, 26, 27, 28, 29, 30 (e.g., 21, 22, 23 (e.g., 21))) contiguous nucleotides differing by no more than 3 (e.g., 0, 1, 2, or 3) nucleotides from the nucleotide sequence of the sense strand set forth in SEQ ID NO: 786. In some embodiments, the antisense strand comprises at least 23 (e.g., 24, 25, 26, 27, 28, 29, 30 (e.g., 23)) contiguous nucleotides differing by no more than 3 (e.g., 0, 1, 2, or 3) nucleotides from the nucleotide sequence of the antisense strand set forth in SEQ ID NO: 1190; and the sense strand comprises at least 21 (e.g., 22, 23, 24, 25, 26, 27, 28, 29, 30 (e.g., 21, 22, 23 (e.g., 21))) contiguous nucleotides differing by no more than 3 (e.g., 0, 1, 2, or 3) nucleotides from the nucleotide sequence of the sense strand set forth in SEQ ID NO: 786.

[0584] In some embodiments, the antisense strand comprises from about 15-23 (e.g., 15-22, 15-21, 15-20, 15-19, 15-18, 15-17, 15-16, 16-22, 16-20, 16-19, 16-18, 16-17, 17-23, 17-22, 17-21, 17-20, 17-19, 17-18, 18-23, 18-22, 18-21, 18-20, 18-19, 19-23, 19-22, 19-21, 19-20, 20-23, 20-22, 20-21, 21-23, 21-22, 22-23) contiguous nucleotides differing by no more than 3 (e.g., 0, 1, 2, or 3) nucleotides from the nucleotide sequence of the antisense strand set forth in SEQ ID NO: 1190; and the sense strand comprises from about 15-23 (e.g., 15-22, 15-21, 15-20, 15-19, 15-18, 15-17, 15-16, 16-22, 16-20, 16-19, 16-18, 16-17, 17-23, 17-22, 17-21, 17-20, 17-19, 17-18, 18-23, 18-22, 18-21, 18-20, 18-19, 19-23, 19-22, 19-21, 19-20, 20-23, 20-22, 20-21, 21-23, 21-22, 22-23) contiguous nucleotides differing by no more than 3 (e.g., 0, 1, 2, or 3) nucleotides from the nucleotide sequence of the sense strand set forth in SEQ ID NO: 786. In some embodiments, the antisense strand comprises from about 19-23 (e.g., 19-22, 19-21, 19-20, 20-23, 20-22, 20-21, 21-23, 21-22, 22-23) contiguous nucleotides differing by no more than 3 (e.g., 0, 1, 2, or 3) nucleotides from the nucleotide sequence of the antisense strand set forth in SEQ ID NO: 1190; and the sense strand comprises from about 19-23 (e.g., 19-22, 19-21, 19-20, 20-23, 20-22, 20-21, 21-23, 21-22, 22-23) contiguous nucleotides differing by no more than 3 (e.g., 0, 1, 2, or 3) nucleotides from the nucleotide sequence of the sense strand set forth in SEQ ID NO: 786. In some embodiments, the antisense strand comprises from about from about 21-23 (e.g., 21-22, 22-23) contiguous nucleotides differing by no more than 3 (e.g., 0, 1, 2, or 3) nucleotides from the nucleotide sequence of the antisense strand set forth in SEQ ID NO: 1190; and the sense strand comprises from about 19-23 (e.g., 19-22, 19-21, 19-20, 20-23, 20-22, 20-21, 21-23, 21-22, 22-23) contiguous nucleotides differing by no more than 3 (e.g., 0, 1, 2, or 3) nucleotides from the nucleotide sequence of the sense strand set forth in SEQ ID NO: 786. In some embodiments, the antisense strand comprises from about 21-23 (e.g., 21-22, 22-23) contiguous nucleotides differing by no more than 3 (e.g., 0, 1, 2, or 3) nucleotides from the nucleotide sequence of the antisense strand set forth in SEQ ID NO: 1190; and the sense strand comprises from about 21-23 (e.g., 21-22, 22-23) contiguous nucleotides differing by no more than 3 (e.g., 0, 1, 2, or 3) nucleotides from the nucleotide sequence of the sense strand set forth in SEQ ID NO: 786.

[0585] In some embodiments, the antisense strand comprises about 15, 16, 17, 18, 19, 20, 21, 22, 23, 24, 25, 26, 27, 28, 29, or 30 (e.g., 19, 20, 21, 22, 23 (e.g., 23)) contiguous nucleotides differing by no more than 3 (e.g., 0, 1, 2, or 3) nucleotides from the nucleotide sequence of the antisense strand set forth in SEQ ID NO: 1190; and the sense strand comprises about 15, 16, 17, 18, 19, 20, 21, 22, 23, 24, 25, 26, 27, 28, 29, or 30 (e.g., 19, 20, 21, 22, 23 (e.g., 21)) contiguous nucleotides differing by no more than 3 (e.g., 0, 1, 2, or 3) nucleotides from the nucleotide sequence of the sense strand set forth in SEQ ID NO: 786. In some embodiments, the antisense strand comprises about 19, 20, 21, 22, 23, 24, 25, 26, 27, 28, 29, 30 (e.g., 19, 20, 21, 22, 23 (e.g., 23)) contiguous nucleotides differing by no more than 3 (e.g., 0, 1, 2, or 3) nucleotides from the nucleotide sequence of the antisense strand set forth in SEQ ID NO: 1190; and the sense strand comprises 19, 20, 21, 22, 23, 24, 25, 26, 27, 28, 29, 30 (e.g., 19, 20, 21, 22, 23 (e.g., 21)) contiguous nucleotides differing by no more than 3 (e.g., 0, 1, 2, or 3) nucleotides from the nucleotide sequence of the sense strand set forth in SEQ ID NO: 786. In some embodiments, the antisense strand comprises about 21, 22, 23, 24, 25, 26, 27, 28, 29, 30 (e.g., 21, 22, 23 (e.g., 23)) contiguous nucleotides differing by no more than 3 (e.g., 0, 1, 2, or 3) nucleotides from the nucleotide sequence of the antisense strand set forth in SEQ ID NO: 1190; and the sense strand about 19, 20, 21, 22, 23, 24, 25, 26, 27, 28, 29, 30 (e.g., 19, 20, 21, 22, 23 (e.g., 21)) contiguous nucleotides differing by no more than 3 (e.g., 0, 1, 2, or 3) nucleotides from the nucleotide sequence of the sense strand set forth in SEQ ID NO: 786. In some embodiments, the antisense strand comprises about 21, 22, 23, 24, 25, 26, 27, 28, 29, 30 (e.g., 21, 22, 23 (e.g., 23)) contiguous nucleotides differing by no more than 3 (e.g., 0, 1, 2, or 3) nucleotides from the nucleotide sequence of the antisense strand set forth in SEQ ID NO: 1190; and the sense strand comprises about 21, 22, 23, 24, 25, 26, 27, 28, 29, 30 (e.g., 21, 22, 23 (e.g., 21)) contiguous nucleotides differing by no more than 3 (e.g., 0, 1, 2, or 3) nucleotides from the nucleotide sequence of the sense strand set forth in SEQ ID NO: 786. In some embodiments, the antisense strand comprises about 23, 24, 25, 26, 27, 28, 29, 30 (e.g., 23) contiguous nucleotides differing by no more than 3 (e.g., 0, 1, 2, or 3) nucleotides from the nucleotide sequence of the antisense strand set forth in SEQ ID NO: 1190; and the sense strand comprises about 21, 22, 23, 24, 25, 26, 27, 28, 29, 30 (e.g., 21, 22, 23 (e.g., 21)) contiguous nucleotides differing by no more than 3 (e.g., 0, 1, 2, or 3) nucleotides from the nucleotide sequence of the sense strand set forth in SEQ ID NO: 786. In some embodiments, the antisense strand comprises about 23 contiguous nucleotides differing by no more than 3 (e.g., 0, 1, 2, or 3) nucleotides from the nucleotide sequence of the antisense strand set forth in SEQ ID NO: 1190; and the sense strand comprises about 21 contiguous nucleotides differing by no more than 3 (e.g., 0, 1, 2, or 3) nucleotides from the nucleotide sequence of the sense strand set forth in SEQ ID NO: 786. In some embodiments, the antisense strand comprises about 21 contiguous nucleotides differing by no more than 3 (e.g., 0, 1, 2, or 3) nucleotides from the nucleotide sequence of the antisense strand set forth in SEQ ID NO: 1190; and the sense strand comprises about 19 contiguous nucleotides differing by no more than 3 (e.g., 0, 1, 2, or 3) nucleotides from the nucleotide sequence of the sense strand set forth in SEQ ID NO: 786.

[0586] In some embodiments, the nucleotide sequence of the antisense strand comprises the nucleotide sequence of the antisense strand set forth in SEQ ID NO: 1190 differing by no more than 3 (e.g., 0, 1, 2, or 3) nucleotides from the nucleotide sequence of the antisense strand set forth in SEQ ID NO: 1190; and the nucleotide sequence of the sense strand comprises the nucleotide sequence of the sense strand set forth in SEQ ID NO: 786 differing by no more than 3 (e.g., 0, 1, 2, or 3) nucleotides from the sense strand set forth in SEQ ID NO: 786.

[0587] In some embodiments, the nucleotide sequence of the antisense strand comprises the nucleotide sequence of antisense strand set forth in SEQ ID NO: 1190; and the nucleotide sequence of the sense strand comprises the nucleotide sequence of the sense strand set forth in SEQ ID NO: 786.

[0588] In some embodiments, the antisense strand consists of about 15, 16, 17, 18, 19, 20, 21, 22, 23, 24, 25, 26, 27, 28, 29, or 30 (e.g., 19, 20, 21, 22, 23 (e.g., 23)) contiguous nucleotides differing by no more than 3 (e.g., 0, 1, 2, or 3) nucleotides from the nucleotide sequence of the antisense strand set forth in SEQ ID NO: 1190; and the sense strand consists of about 15, 16, 17, 18, 19, 20, 21, 22, 23, 24, 25, 26, 27, 28, 29, or 30 (e.g., 19, 20, 21, 22, 23 (e.g., 21)) contiguous nucleotides differing by no more than 3 (e.g., 0, 1, 2, or 3) nucleotides from the nucleotide sequence of the sense strand set forth in SEQ ID NO: 786. In some embodiments, the antisense strand consists of about 19, 20, 21, 22, 23, 24, 25, 26, 27, 28, 29, 30 (e.g., 19, 20, 21, 22, 23 (e.g., 23)) contiguous nucleotides differing by no more than 3 (e.g., 0, 1, 2, or 3) nucleotides from the nucleotide sequence of the antisense strand set forth in SEQ ID NO: 1190; and the sense strand consists of 19, 20, 21, 22, 23, 24, 25, 26, 27, 28, 29, 30 (e.g., 19, 20, 21, 22, 23 (e.g., 21)) contiguous nucleotides differing by no more than 3 (e.g., 0, 1, 2, or 3) nucleotides from the nucleotide sequence of the sense strand set forth in SEQ ID NO: 786. In some embodiments, the antisense strand consists of about 21, 22, 23, 24, 25, 26, 27, 28, 29, 30 (e.g., 21, 22, 23 (e.g., 23)) contiguous nucleotides differing by no more than 3 (e.g., 0, 1, 2, or 3) nucleotides from the nucleotide sequence of the antisense strand set forth in SEQ ID NO: 1190; and the sense strand consists of about 19, 20, 21, 22, 23, 24, 25, 26, 27, 28, 29, 30 (e.g., 19, 20, 21, 22, 23 (e.g., 21)) contiguous nucleotides differing by no more than 3 (e.g., 0, 1, 2, or 3) nucleotides from the nucleotide sequence of the sense strand set forth in SEQ ID NO: 786. In some embodiments, the antisense strand consists of about 21, 22, 23, 24, 25, 26, 27, 28, 29, 30 (e.g., 21, 22, 23 (e.g., 23)) contiguous nucleotides differing by no more than 3 (e.g., 0, 1, 2, or 3) nucleotides from the nucleotide sequence of the antisense strand set forth in SEQ ID NO: 1190; and the sense strand consists of at about 21, 22, 23, 24, 25, 26, 27, 28, 29, 30 (e.g., 21, 22, 23 (e.g., 21)) contiguous nucleotides differing by no more than 3 (e.g., 0, 1, 2, or 3) nucleotides from the nucleotide sequence of the sense strand set forth in SEQ ID NO: 786. In some embodiments, the antisense strand consists of about 23, 24, 25, 26, 27, 28, 29, 30 (e.g., 23) contiguous nucleotides differing by no more than 3 (e.g., 0, 1, 2, or 3) nucleotides from the nucleotide sequence of the antisense strand set forth in SEQ ID NO: 1190; and the sense strand consists of about 21, 22, 23, 24, 25, 26, 27, 28, 29, 30 (e.g., 21, 22, 23 (e.g., 21)) contiguous nucleotides differing by no more than 3 (e.g., 0, 1, 2, or 3) nucleotides from the nucleotide sequence of the sense strand set forth in SEQ ID NO: 786. In some embodiments, the antisense strand consists of about 23 contiguous nucleotides differing by no more than 3 (e.g., 0, 1, 2, or 3) nucleotides from the nucleotide sequence of the antisense strand set forth in SEQ ID NO: 1190; and the sense strand consists of about 21 contiguous nucleotides differing by no more than 3 (e.g., 0, 1, 2, or 3) nucleotides from the nucleotide sequence of the sense strand set forth in SEQ ID NO: 786. In some embodiments, the antisense strand consists of about 21 contiguous nucleotides differing by no more than 3 (e.g., 0, 1, 2, or 3) nucleotides from the nucleotide sequence of the antisense strand set forth in SEQ ID NO: 1190; and the sense strand consists of about 19 contiguous nucleotides differing by no more than 3 (e.g., 0, 1, 2, or 3) nucleotides from the nucleotide sequence of the sense strand set forth in SEQ ID NO: 786.

[0589] In some embodiments, the nucleotide sequence of the antisense strand consists of the nucleotide sequence of the antisense strand set forth in SEQ ID NO: 1190 differing by no more than 3 (e.g., 0, 1, 2, or 3) nucleotides from the nucleotide sequence of the antisense strand set forth in SEQ ID NO: 1190; and the nucleotide sequence of the sense strand consists of the nucleotide sequence of the sense strand set forth in SEQ ID NO: 786 differing by no more than 3 (e.g., 0, 1, 2, or 3) nucleotides from the sense strand set forth in SEQ ID NO: 786.

[0590] In some embodiments, the nucleotide sequence of the antisense strand consists of the nucleotide sequence of antisense strand set forth in SEQ ID NO: 1190; and the nucleotide sequence of the sense strand consists of the nucleotide sequence of the sense strand set forth in SEQ ID NO: 786.

[0591] In some embodiments, the nucleotide sequence of the antisense strand differs by no more than 5 (e.g., 0, 1, 2, 3, 4, or 5) nucleotides from the nucleotide sequence set forth in SEQ ID NO: 1188; and the nucleotide sequence of the sense strand differs by no more than 5 (e.g., 0, 1, 2, 3, 4, or 5) nucleotides from the nucleotide sequence set forth in SEQ ID NO: 786. In some embodiments, the nucleotide sequence of the antisense strand differs by no more than 3 (e.g., 0, 1, 2, or 3) nucleotides from the nucleotide sequence set forth in SEQ ID NO: 1188; and the nucleotide sequence of the sense strand differs by no more than 3 (e.g., 0, 1, 2, or 3) nucleotides from the nucleotide sequence set forth in SEQ ID NO: 786. In some embodiments, the nucleotide sequence of the antisense strand differs by no more than 2 (e.g., 0, 1, or 2) nucleotides from the nucleotide sequence set forth in SEQ ID NO: 1188; and the nucleotide sequence of the sense strand differs by no more than 2 (e.g., 0, 1, or 2) nucleotides from the nucleotide sequence set forth in SEQ ID NO: 786. In some embodiments, the nucleotide sequence of the antisense strand differs by no more than 1 (e.g., 0 or 1) nucleotide from the nucleotide sequence set forth in SEQ ID NO: 1188; and the nucleotide sequence of the sense strand differs by no more than 1 (e.g., 0 or 1) nucleotide from the nucleotide sequence set forth in SEQ ID NO: 786.

[0592] In some embodiments, the nucleotide sequence of the antisense strand comprises the nucleotide sequence set forth in SEQ ID NO: 1188 differing by no more than 5 (e.g., 0, 1, 2, 3, 4, or 5) nucleotides from the nucleotide sequence set forth in SEQ ID NO: 1188; and the nucleotide sequence of the sense strand comprises the nucleotide sequence set forth in SEQ ID NO: 1188 differing by no more than 5 (e.g., 0, 1, 2, 3, 4, or 5) nucleotides from the nucleotide sequence set forth in SEQ ID NO: 786. In some embodiments, the nucleotide sequence of the antisense strand comprises the nucleotide sequence set forth in SEQ ID NO: 1188 differing by no more than 3 (e.g., 0, 1, 2, or 3) nucleotides from the nucleotide sequence set forth in SEQ ID NO: 1188; and the nucleotide sequence of the sense strand comprises the nucleotide sequence set forth in SEQ ID NO: 786 differing by no more than 3 (e.g., 0, 1, 2, or 3) nucleotides from the nucleotide sequence set forth in SEQ ID NO: 786. In some embodiments, the nucleotide sequence of the antisense strand comprises the nucleotide sequence set forth in SEQ ID NO: 1188 differing by no more than 2 (e.g., 0, 1, or 2) nucleotides from the nucleotide sequence set forth in SEQ ID NO: 1188; and the nucleotide sequence of the sense strand comprises the nucleotide sequence set forth in SEQ ID NO: 786 differing by no more than 2 (e.g., 0, 1, or 2) nucleotides from the nucleotide sequence set forth in SEQ ID NO: 786. In some embodiments, the nucleotide sequence of the antisense strand comprises the nucleotide sequence set forth in SEQ ID NO: 1188 differing by no more than 1 (e.g., 0 or 1) nucleotide from nucleotide sequence set forth in SEQ ID NO: 1188; and the nucleotide sequence of the sense strand comprises the nucleotide sequence set forth in SEQ ID NO: 786 differing by no more than 1 (e.g., 0 or 1) nucleotide from nucleotide sequence set forth in SEQ ID NO: 786.

[0593] In some embodiments, the nucleotide sequence of the antisense strand is at least 85%, 86%, 87%, 88%, 89%, 90%, 91%, 92%, 93%, 94%, 95%, 96%, 97%, 98%, 99% or 100% identical to the nucleotide sequence set forth in SEQ ID NO: 1188; and the nucleotide sequence of the sense strand is at least 85%, 86%, 87%, 88%, 89%, 90%, 91%, 92%, 93%, 94%, 95%, 96%, 97%, 98%, 99% or 100% identical to the nucleotide sequence set forth in SEQ ID NO: 786. In some embodiments, the nucleotide sequence of the antisense strand is at least 90%, 91%, 92%, 93%, 94%, 95%, 96%, 97%, 98%, 99% or 100% identical to the nucleotide sequence set forth in SEQ ID NO: 1188; and the nucleotide sequence of the sense strand is at least 90%, 91%, 92%, 93%, 94%, 95%, 96%, 97%, 98%, 99% or 100% identical to the nucleotide sequence set forth in SEQ ID NO: 786. In some embodiments, the nucleotide sequence of the antisense strand is at least 95%, 96%, 97%, 98%, 99% or 100% identical to the nucleotide sequence set forth in SEQ ID NO: 1188; and the nucleotide sequence of the sense strand is at least 95%, 96%, 97%, 98%, 99% or 100% identical to the nucleotide sequence set forth in SEQ ID NO: 786. In some embodiments, the nucleotide sequence of the antisense strand is at least 96%, 97%, 98%, 99% or 100% identical to the nucleotide sequence set forth in SEQ ID NO: 1188; and the nucleotide sequence of the sense strand is at least 96%, 97%, 98%, 99% or 100% identical to the nucleotide sequence set forth in SEQ ID NO: 786. In some embodiments, the nucleotide sequence of the antisense strand is at least 97%, identical to the nucleotide sequence set forth in SEQ ID NO: 1188; and the nucleotide sequence of the sense strand is at least 97%, identical to the nucleotide sequence set forth in SEQ ID NO: 786. In some embodiments, the nucleotide sequence of the antisense strand is at least 98% identical to the nucleotide sequence set forth in SEQ ID NO: 1188; and the nucleotide sequence of the sense strand is at least 98% identical to the nucleotide sequence set forth in SEQ ID NO: 786. In some embodiments, the nucleotide sequence of the antisense strand is at least 99% identical to the nucleotide sequence set forth in SEQ ID NO: 1188; and the nucleotide sequence of the sense strand is at least 99% identical to the nucleotide sequence set forth in SEQ ID NO: 786. In some embodiments, the nucleotide sequence of the antisense strand is 100% identical to the nucleotide sequence set forth in SEQ ID NO: 1188; and the nucleotide sequence of the sense strand is 100% identical to the nucleotide sequence set forth in SEQ ID NO: 786.

[0594] In some embodiments, the nucleotide sequence of the antisense strand comprises the nucleotide sequence set forth in SEQ ID NO: 1188; and the nucleotide sequence of the sense strand comprises the nucleotide sequence set forth in SEQ ID NO: 786. In some embodiments, the nucleotide sequence of the antisense strand consists of the nucleotide sequence set forth in SEQ ID NO: 1188; and the nucleotide sequence of the sense strand consists of the nucleotide sequence set forth in SEQ ID NO: 786.

[0595] In some embodiments, the antisense strand comprises at least 15 (e.g., 15, 16, 17, 18, 19, 20, 21, 22, 23, 24, 25, 26, 27, 28, 29, 30 (e.g., 19, 20, 21, 22, 23 (e.g., 23))) contiguous nucleotides differing by no more than 3 (e.g., 0, 1, 2, or 3) nucleotides from the nucleotide sequence of the antisense strand set forth in SEQ ID NO: 1188; and the sense strand comprises at least 15 (e.g., 15, 16, 17, 18, 19, 20, 21, 22, 23, 24, 25, 26, 27, 28, 29, 30 (e.g., 19, 20, 21, 22, 23 (e.g., 21))) contiguous nucleotides differing by no more than 3 (e.g., 0, 1, 2, or 3) nucleotides from the nucleotide sequence of the sense strand set forth in SEQ ID NO: 786. In some embodiments, the antisense strand comprises at least 19 (e.g., 20, 21, 22, 23, 24, 25, 26, 27, 28, 29, 30 (e.g., 19, 20, 21, 22, 23 (e.g., 23))) contiguous nucleotides differing by no more than 3 (e.g., 0, 1, 2, or 3) nucleotides from the nucleotide sequence of the antisense strand set forth in SEQ ID NO: 1188; and the sense strand comprises at least 19 (e.g., 20, 21, 22, 23, 24, 25, 26, 27, 28, 29, 30 (e.g., 19, 20, 21, 22, 23 (e.g., 21))) contiguous nucleotides differing by no more than 3 (e.g., 0, 1, 2, or 3) nucleotides from the nucleotide sequence of the sense strand set forth in SEQ ID NO: 786. In some embodiments, the antisense strand comprises at least 21 (e.g., 22, 23, 24, 25, 26, 27, 28, 29, 30 (e.g., 21, 22, 23 (e.g., 23))) contiguous nucleotides differing by no more than 3 (e.g., 0, 1, 2, or 3) nucleotides from the nucleotide sequence of the antisense strand set forth in SEQ ID NO: 1188; and the sense strand comprises at least 19 (e.g., 20, 21, 22, 23, 24, 25, 26, 27, 28, 29, 30 (e.g., 19, 20, 21, 22, 23 (e.g., 21))) contiguous nucleotides differing by no more than 3 (e.g., 0, 1, 2, or 3) nucleotides from the nucleotide sequence of the sense strand set forth in SEQ ID NO: 786. In some embodiments, the antisense strand comprises at least 21 (e.g., 22, 23, 24, 25, 26, 27, 28, 29, 30 (e.g., 21, 22, 23 (e.g., 23))) contiguous nucleotides differing by no more than 3 (e.g., 0, 1, 2, or 3) nucleotides from the nucleotide sequence of the antisense strand set forth in SEQ ID NO: 1188; and the sense strand comprises at least 21 (e.g., 22, 23, 24, 25, 26, 27, 28, 29, 30 (e.g., 21, 22, 23 (e.g., 21))) contiguous nucleotides differing by no more than 3 (e.g., 0, 1, 2, or 3) nucleotides from the nucleotide sequence of the sense strand set forth in SEQ ID NO: 786. In some embodiments, the antisense strand comprises at least 23 (e.g., 24, 25, 26, 27, 28, 29, 30 (e.g., 23)) contiguous nucleotides differing by no more than 3 (e.g., 0, 1, 2, or 3) nucleotides from the nucleotide sequence of the antisense strand set forth in SEQ ID NO: 1188; and the sense strand comprises at least 21 (e.g., 22, 23, 24, 25, 26, 27, 28, 29, 30 (e.g., 21, 22, 23 (e.g., 21))) contiguous nucleotides differing by no more than 3 (e.g., 0, 1, 2, or 3) nucleotides from the nucleotide sequence of the sense strand set forth in SEQ ID NO: 786.

[0596] In some embodiments, the antisense strand comprises from about 15-23 (e.g., 15-22, 15-21, 15-20, 15-19, 15-18, 15-17, 15-16, 16-22, 16-20, 16-19, 16-18, 16-17, 17-23, 17-22, 17-21, 17-20, 17-19, 17-18, 18-23, 18-22, 18-21, 18-20, 18-19, 19-23, 19-22, 19-21, 19-20, 20-23, 20-22, 20-21, 21-23, 21-22, 22-23) contiguous nucleotides differing by no more than 3 (e.g., 0, 1, 2, or 3) nucleotides from the nucleotide sequence of the antisense strand set forth in SEQ ID NO: 1188; and the sense strand comprises from about 15-23 (e.g., 15-22, 15-21, 15-20, 15-19, 15-18, 15-17, 15-16, 16-22, 16-20, 16-19, 16-18, 16-17, 17-23, 17-22, 17-21, 17-20, 17-19, 17-18, 18-23, 18-22, 18-21, 18-20, 18-19, 19-23, 19-22, 19-21, 19-20, 20-23, 20-22, 20-21, 21-23, 21-22, 22-23) contiguous nucleotides differing by no more than 3 (e.g., 0, 1, 2, or 3) nucleotides from the nucleotide sequence of the sense strand set forth in SEQ ID NO: 786. In some embodiments, the antisense strand comprises from about 19-23 (e.g., 19-22, 19-21, 19-20, 20-23, 20-22, 20-21, 21-23, 21-22, 22-23) contiguous nucleotides differing by no more than 3 (e.g., 0, 1, 2, or 3) nucleotides from the nucleotide sequence of the antisense strand set forth in SEQ ID NO: 1188; and the sense strand comprises from about 19-23 (e.g., 19-22, 19-21, 19-20, 20-23, 20-22, 20-21, 21-23, 21-22, 22-23) contiguous nucleotides differing by no more than 3 (e.g., 0, 1, 2, or 3) nucleotides from the nucleotide sequence of the sense strand set forth in SEQ ID NO: 786. In some embodiments, the antisense strand comprises from about from about 21-23 (e.g., 21-22, 22-23) contiguous nucleotides differing by no more than 3 (e.g., 0, 1, 2, or 3) nucleotides from the nucleotide sequence of the antisense strand set forth in SEQ ID NO: 1188; and the sense strand comprises from about 19-23 (e.g., 19-22, 19-21, 19-20, 20-23, 20-22, 20-21, 21-23, 21-22, 22-23) contiguous nucleotides differing by no more than 3 (e.g., 0, 1, 2, or 3) nucleotides from the nucleotide sequence of the sense strand set forth in SEQ ID NO: 786. In some embodiments, the antisense strand comprises from about 21-23 (e.g., 21-22, 22-23) contiguous nucleotides differing by no more than 3 (e.g., 0, 1, 2, or 3) nucleotides from the nucleotide sequence of the antisense strand set forth in SEQ ID NO: 1188; and the sense strand comprises from about 21-23 (e.g., 21-22, 22-23) contiguous nucleotides differing by no more than 3 (e.g., 0, 1, 2, or 3) nucleotides from the nucleotide sequence of the sense strand set forth in SEQ ID NO: 786.

[0597] In some embodiments, the antisense strand comprises about 15, 16, 17, 18, 19, 20, 21, 22, 23, 24, 25, 26, 27, 28, 29, or 30 (e.g., 19, 20, 21, 22, 23 (e.g., 23)) contiguous nucleotides differing by no more than 3 (e.g., 0, 1, 2, or 3) nucleotides from the nucleotide sequence of the antisense strand set forth in SEQ ID NO: 1188; and the sense strand comprises about 15, 16, 17, 18, 19, 20, 21, 22, 23, 24, 25, 26, 27, 28, 29, or 30 (e.g., 19, 20, 21, 22, 23 (e.g., 21)) contiguous nucleotides differing by no more than 3 (e.g., 0, 1, 2, or 3) nucleotides from the nucleotide sequence of the sense strand set forth in SEQ ID NO: 786. In some embodiments, the antisense strand comprises about 19, 20, 21, 22, 23, 24, 25, 26, 27, 28, 29, 30 (e.g., 19, 20, 21, 22, 23 (e.g., 23)) contiguous nucleotides differing by no more than 3 (e.g., 0, 1, 2, or 3) nucleotides from the nucleotide sequence of the antisense strand set forth in SEQ ID NO: 1188; and the sense strand comprises 19, 20, 21, 22, 23, 24, 25, 26, 27, 28, 29, 30 (e.g., 19, 20, 21, 22, 23 (e.g., 21)) contiguous nucleotides differing by no more than 3 (e.g., 0, 1, 2, or 3) nucleotides from the nucleotide sequence of the sense strand set forth in SEQ ID NO: 786. In some embodiments, the antisense strand comprises about 21, 22, 23, 24, 25, 26, 27, 28, 29, 30 (e.g., 21, 22, 23 (e.g., 23)) contiguous nucleotides differing by no more than 3 (e.g., 0, 1, 2, or 3) nucleotides from the nucleotide sequence of the antisense strand set forth in SEQ ID NO: 1188; and the sense strand about 19, 20, 21, 22, 23, 24, 25, 26, 27, 28, 29, 30 (e.g., 19, 20, 21, 22, 23 (e.g., 21)) contiguous nucleotides differing by no more than 3 (e.g., 0, 1, 2, or 3) nucleotides from the nucleotide sequence of the sense strand set forth in SEQ ID NO: 786. In some embodiments, the antisense strand comprises about 21, 22, 23, 24, 25, 26, 27, 28, 29, 30 (e.g., 21, 22, 23 (e.g., 23)) contiguous nucleotides differing by no more than 3 (e.g., 0, 1, 2, or 3) nucleotides from the nucleotide sequence of the antisense strand set forth in SEQ ID NO: 1188; and the sense strand comprises about 21, 22, 23, 24, 25, 26, 27, 28, 29, 30 (e.g., 21, 22, 23 (e.g., 21)) contiguous nucleotides differing by no more than 3 (e.g., 0, 1, 2, or 3) nucleotides from the nucleotide sequence of the sense strand set forth in SEQ ID NO: 786. In some embodiments, the antisense strand comprises about 23, 24, 25, 26, 27, 28, 29, 30 (e.g., 23) contiguous nucleotides differing by no more than 3 (e.g., 0, 1, 2, or 3) nucleotides from the nucleotide sequence of the antisense strand set forth in SEQ ID NO: 1188; and the sense strand comprises about 21, 22, 23, 24, 25, 26, 27, 28, 29, 30 (e.g., 21, 22, 23 (e.g., 21)) contiguous nucleotides differing by no more than 3 (e.g., 0, 1, 2, or 3) nucleotides from the nucleotide sequence of the sense strand set forth in SEQ ID NO: 786. In some embodiments, the antisense strand comprises about 23 contiguous nucleotides differing by no more than 3 (e.g., 0, 1, 2, or 3) nucleotides from the nucleotide sequence of the antisense strand set forth in SEQ ID NO: 1188; and the sense strand comprises about 21 contiguous nucleotides differing by no more than 3 (e.g., 0, 1, 2, or 3) nucleotides from the nucleotide sequence of the sense strand set forth in SEQ ID NO: 786. In some embodiments, the antisense strand comprises about 21 contiguous nucleotides differing by no more than 3 (e.g., 0, 1, 2, or 3) nucleotides from the nucleotide sequence of the antisense strand set forth in SEQ ID NO: 1188; and the sense strand comprises about 19 contiguous nucleotides differing by no more than 3 (e.g., 0, 1, 2, or 3) nucleotides from the nucleotide sequence of the sense strand set forth in SEQ ID NO: 786.

[0598] In some embodiments, the nucleotide sequence of the antisense strand comprises the nucleotide sequence of the antisense strand set forth in SEQ ID NO: 1188 differing by no more than 3 (e.g., 0, 1, 2, or 3) nucleotides from the nucleotide sequence of the antisense strand set forth in SEQ ID NO: 1188; and the nucleotide sequence of the sense strand comprises the nucleotide sequence of the sense strand set forth in SEQ ID NO: 786 differing by no more than 3 (e.g., 0, 1, 2, or 3) nucleotides from the sense strand set forth in SEQ ID NO: 786.

[0599] In some embodiments, the nucleotide sequence of the antisense strand comprises the nucleotide sequence of antisense strand set forth in SEQ ID NO: 1188; and the nucleotide sequence of the sense strand comprises the nucleotide sequence of the sense strand set forth in SEQ ID NO: 786.

[0600] In some embodiments, the antisense strand consists of about 15, 16, 17, 18, 19, 20, 21, 22, 23, 24, 25, 26, 27, 28, 29, or 30 (e.g., 19, 20, 21, 22, 23 (e.g., 23)) contiguous nucleotides differing by no more than 3 (e.g., 0, 1, 2, or 3) nucleotides from the nucleotide sequence of the antisense strand set forth in SEQ ID NO: 1188; and the sense strand consists of about 15, 16, 17, 18, 19, 20, 21, 22, 23, 24, 25, 26, 27, 28, 29, or 30 (e.g., 19, 20, 21, 22, 23 (e.g., 21)) contiguous nucleotides differing by no more than 3 (e.g., 0, 1, 2, or 3) nucleotides from the nucleotide sequence of the sense strand set forth in SEQ ID NO: 786. In some embodiments, the antisense strand consists of about 19, 20, 21, 22, 23, 24, 25, 26, 27, 28, 29, 30 (e.g., 19, 20, 21, 22, 23 (e.g., 23)) contiguous nucleotides differing by no more than 3 (e.g., 0, 1, 2, or 3) nucleotides from the nucleotide sequence of the antisense strand set forth in SEQ ID NO: 1188; and the sense strand consists of 19, 20, 21, 22, 23, 24, 25, 26, 27, 28, 29, 30 (e.g., 19, 20, 21, 22, 23 (e.g., 21)) contiguous nucleotides differing by no more than 3 (e.g., 0, 1, 2, or 3) nucleotides from the nucleotide sequence of the sense strand set forth in SEQ ID NO: 786. In some embodiments, the antisense strand consists of about 21, 22, 23, 24, 25, 26, 27, 28, 29, 30 (e.g., 21, 22, 23 (e.g., 23)) contiguous nucleotides differing by no more than 3 (e.g., 0, 1, 2, or 3) nucleotides from the nucleotide sequence of the antisense strand set forth in SEQ ID NO: 1188; and the sense strand consists of about 19, 20, 21, 22, 23, 24, 25, 26, 27, 28, 29, 30 (e.g., 19, 20, 21, 22, 23 (e.g., 21)) contiguous nucleotides differing by no more than 3 (e.g., 0, 1, 2, or 3) nucleotides from the nucleotide sequence of the sense strand set forth in SEQ ID NO: 786. In some embodiments, the antisense strand consists of about 21, 22, 23, 24, 25, 26, 27, 28, 29, 30 (e.g., 21, 22, 23 (e.g., 23)) contiguous nucleotides differing by no more than 3 (e.g., 0, 1, 2, or 3) nucleotides from the nucleotide sequence of the antisense strand set forth in SEQ ID NO: 1188; and the sense strand consists of at about 21, 22, 23, 24, 25, 26, 27, 28, 29, 30 (e.g., 21, 22, 23 (e.g., 21)) contiguous nucleotides differing by no more than 3 (e.g., 0, 1, 2, or 3) nucleotides from the nucleotide sequence of the sense strand set forth in SEQ ID NO: 786. In some embodiments, the antisense strand consists of about 23, 24, 25, 26, 27, 28, 29, 30 (e.g., 23) contiguous nucleotides differing by no more than 3 (e.g., 0, 1, 2, or 3) nucleotides from the nucleotide sequence of the antisense strand set forth in SEQ ID NO: 1188; and the sense strand consists of about 21, 22, 23, 24, 25, 26, 27, 28, 29, 30 (e.g., 21, 22, 23 (e.g., 21)) contiguous nucleotides differing by no more than 3 (e.g., 0, 1, 2, or 3) nucleotides from the nucleotide sequence of the sense strand set forth in SEQ ID NO: 786. In some embodiments, the antisense strand consists of about 23 contiguous nucleotides differing by no more than 3 (e.g., 0, 1, 2, or 3) nucleotides from the nucleotide sequence of the antisense strand set forth in SEQ ID NO: 1188; and the sense strand consists of about 21 contiguous nucleotides differing by no more than 3 (e.g., 0, 1, 2, or 3) nucleotides from the nucleotide sequence of the sense strand set forth in SEQ ID NO: 786. In some embodiments, the antisense strand consists of about 21 contiguous nucleotides differing by no more than 3 (e.g., 0, 1, 2, or 3) nucleotides from the nucleotide sequence of the antisense strand set forth in SEQ ID NO: 1188; and the sense strand consists of about 19 contiguous nucleotides differing by no more than 3 (e.g., 0, 1, 2, or 3) nucleotides from the nucleotide sequence of the sense strand set forth in SEQ ID NO: 786.

[0601] In some embodiments, the nucleotide sequence of the antisense strand consists of the nucleotide sequence of the antisense strand set forth in SEQ ID NO: 1188 differing by no more than 3 (e.g., 0, 1, 2, or 3) nucleotides from the nucleotide sequence of the antisense strand set forth in SEQ ID NO: 1188; and the nucleotide sequence of the sense strand consists of the nucleotide sequence of the sense strand set forth in SEQ ID NO: 786 differing by no more than 3 (e.g., 0, 1, 2, or 3) nucleotides from the sense strand set forth in SEQ ID NO: 786.

[0602] In some embodiments, the nucleotide sequence of the antisense strand consists of the nucleotide sequence of antisense strand set forth in SEQ ID NO: 1188; and the nucleotide sequence of the sense strand consists of the nucleotide sequence of the sense strand set forth in SEQ ID NO: 786.

[0603] In some embodiments, the nucleotide sequence of the antisense strand differs by no more than 5 (e.g., 0, 1, 2, 3, 4, or 5) nucleotides from the nucleotide sequence of any one of the antisense strands of any one of dsRNA agents 1-482; and the nucleotide sequence of the sense strand differs by no more than 5 (e.g., 0, 1, 2, 3, 4, or 5) nucleotides from the nucleotide sequence of the sense strand of the corresponding (the same) dsRNA agent. In some embodiments, the nucleotide sequence of the antisense strand differs by no more than 3 (e.g., 0, 1, 2, or 3) nucleotides from the nucleotide sequence of any one of the antisense strands of any one of dsRNA agents 1-482; and the nucleotide sequence of the sense strand differs by no more than 3 (e.g., 0, 1, 2, or 3) nucleotides from the nucleotide sequence of the sense strand of the corresponding (the same) dsRNA agent. In some embodiments, the nucleotide sequence of the antisense strand differs by no more than 2 (e.g., 0, 1, or 2) nucleotides from the nucleotide sequence of any one of the antisense strands of any one of dsRNA agents 1-482; and the nucleotide sequence of the sense strand differs by no more than 2 (e.g., 0, 1, or 2) nucleotides from the nucleotide sequence the sense strand of the corresponding (the same) dsRNA agent. In some embodiments, the nucleotide sequence of the antisense strand differs by no more than 1 (e.g., 0 or 1) nucleotide from the nucleotide sequence of any one of the antisense strands of any one of dsRNA agents 1-482; and the nucleotide sequence of the sense strand differs by no more than 1 (e.g., 0 or 1) nucleotide from the nucleotide sequence of the sense strand of the corresponding (the same) dsRNA agent.

[0604] In some embodiments, the nucleotide sequence of the antisense strand comprises the nucleotide sequence of any one of the antisense strands of any one of dsRNA agents 1-482 differing by no more than 5 (e.g., 0, 1, 2, 3, 4, or 5) nucleotides from the antisense strand of any one of dsRNA agents 1-482; and the nucleotide sequence of the sense strand comprises the nucleotide sequence of the corresponding (the same) dsRNA agent differing by no more than 5 (e.g., 0, 1, 2, 3, 4, or 5) nucleotides from the sense strand of the corresponding (the same) dsRNA agent. In some embodiments, the nucleotide sequence of the antisense strand comprises the nucleotide sequence of any one of the antisense strands of any one of dsRNA agents 1-482 differing by no more than 3 (e.g., 0, 1, 2, or 3) nucleotides from the antisense strand of any one of dsRNA agents 1-482; and the nucleotide sequence of the sense strand comprises the nucleotide sequence of any one of the sense strand of the corresponding (the same) dsRNA agent differing by no more than 3 (e.g., 0, 1, 2, or 3) nucleotides from the sense strand of the corresponding (the same) dsRNA agent. In some embodiments, the nucleotide sequence of the antisense strand comprises the nucleotide sequence of any one of the antisense strands of any one of dsRNA agents 1-482 differing by no more than 2 (e.g., 0, 1, or 2) nucleotides from the antisense strand of any one of dsRNA agents 1-482; and the nucleotide sequence of the sense strand comprises the nucleotide sequence of any one of the sense strands of the corresponding (the same) dsRNA agent differing by no more than 2 (e.g., 0, 1, or 2) nucleotides from the sense strand of the corresponding (the same) dsRNA agent. In some embodiments, the nucleotide sequence of the antisense strand comprises the nucleotide sequence of any one of the antisense strands of any one of dsRNA agents 1-482 differing by no more than 1 (e.g., 0 or 1) nucleotide from the antisense strand of any one of dsRNA agents 1-482; and the nucleotide sequence of the sense strand comprises the nucleotide sequence of any one of the sense strand of the corresponding (the same) dsRNA agent differing by no more than 1 (e.g., 0 or 1) nucleotide from the sense strand of the corresponding (the same) dsRNA agent.

[0605] In some embodiments, the nucleotide sequence of the antisense strand is at least 85%, 86%, 87%, 88%, 89%, 90%, 91%, 92%, 93%, 94%, 95%, 96%, 97%, 98%, 99% or 100% identical to the nucleotide sequence of any one of the antisense strands of any one of dsRNA agents 1-482; and the nucleotide sequence of the sense strand is at least 85%, 86%, 87%, 88%, 89%, 90%, 91%, 92%, 93%, 94%, 95%, 96%, 97%, 98%, 99% or 100% identical to the nucleotide sequence of the sense strand of the corresponding (the same) dsRNA agent. In some embodiments, the nucleotide sequence of the antisense strand is at least 90%, 91%, 92%, 93%, 94%, 95%, 96%, 97%, 98%, 99% or 100% identical to the nucleotide sequence of any one of the antisense strands of any one of dsRNA agents 1-482; and the nucleotide sequence of the sense strand is at least 90%, 91%, 92%, 93%, 94%, 95%, 96%, 97%, 98%, 99% or 100% identical to the nucleotide sequence of the sense strand of the corresponding (the same) dsRNA agent. In some embodiments, the nucleotide sequence of the antisense strand is at least 95%, 96%, 97%, 98%, 99% or 100% identical to the nucleotide sequence of any one of the antisense strands of any one of dsRNA agents 1-482; and the nucleotide sequence of the sense strand is at least 95%, 96%, 97%, 98%, 99% or 100% identical to the nucleotide sequence of the sense strand of the corresponding (the same) dsRNA agent. In some embodiments, the nucleotide sequence of the antisense strand is at least 96%, 97%, 98%, 99% or 100% identical to the nucleotide sequence of any one of the antisense strands of any one of dsRNA agents 1-482; and the nucleotide sequence of the sense strand is at least 96%, 97%, 98%, 99% or 100% identical to the nucleotide sequence of the sense strand of the corresponding (the same) dsRNA agent. In some embodiments, the nucleotide sequence of the antisense strand is at least 97%, identical to the nucleotide sequence of any one of the antisense strands of any one of dsRNA agents 1-482; and the nucleotide sequence of the sense strand is at least 97%, identical to the nucleotide sequence of the sense strand of the corresponding (the same) dsRNA agent. In some embodiments, the nucleotide sequence of the antisense strand is at least 98% identical to the nucleotide sequence of any one of the antisense strands of any one of dsRNA agents 1-482; and the nucleotide sequence of the sense strand is at least 98% identical to the nucleotide sequence of the sense strand of the corresponding (the same) dsRNA agent. In some embodiments, the nucleotide sequence of the antisense strand is at least 99% identical to the nucleotide sequence of any one of the antisense strands of any one of dsRNA agents 1-482; and the nucleotide sequence of the sense strand is at least 99% identical to the nucleotide sequence of the sense strand of the corresponding (the same) dsRNA agent. In some embodiments, the nucleotide sequence of the antisense strand is 100% identical to the nucleotide sequence of any one of the antisense strands of any one of dsRNA agents 1-482; and the nucleotide sequence of the sense strand is 100% identical to the nucleotide sequence of the sense strand of the corresponding (the same) dsRNA agent.

[0606] In some embodiments, the nucleotide sequence of the antisense strand comprises the nucleotide sequence of any one of the antisense strands of any one of dsRNA agents 1-482; and the nucleotide sequence of the sense strand comprises the nucleotide sequence of the sense strand of the corresponding (the same) dsRNA agent. In some embodiments, the nucleotide sequence of the antisense strand consists of the nucleotide sequence of any one of the antisense strands of any one of dsRNA agents 1-482; and the nucleotide sequence of the sense strand consists of the nucleotide sequence of the sense strand of the corresponding (the same) dsRNA agent.

[0607] In some embodiments, the antisense strand comprises at least 15 (e.g., 15, 16, 17, 18, 19, 20, 21, 22, 23, 24, 25, 26, 27, 28, 29, 30 (e.g., 19, 20, 21, 22, 23 (e.g., 23))) contiguous nucleotides differing by no more than 3 (e.g., 0, 1, 2, or 3) nucleotides from the nucleotide sequence of the antisense strand of any one of dsRNA agents 1-482; and the sense strand comprises at least 15 (e.g., 15, 16, 17, 18, 19, 20, 21, 22, 23, 24, 25, 26, 27, 28, 29, 30 (e.g., 19, 20, 21, 22, 23 (e.g., 21))) contiguous nucleotides differing by no more than 3 (e.g., 0, 1, 2, or 3) nucleotides from the nucleotide sequence of the sense strand of the corresponding (the same) dsRNA agent. In some embodiments, the antisense strand comprises at least 19 (e.g., 20, 21, 22, 23, 24, 25, 26, 27, 28, 29, 30 (e.g., 19, 20, 21, 22, 23 (e.g., 23))) contiguous nucleotides differing by no more than 3 (e.g., 0, 1, 2, or 3) nucleotides from the nucleotide sequence of the antisense strand of any one of dsRNA agents 1-482; and the sense strand comprises at least 19 (e.g., 20, 21, 22, 23, 24, 25, 26, 27, 28, 29, 30 (e.g., 19, 20, 21, 22, 23 (e.g., 21))) contiguous nucleotides differing by no more than 3 (e.g., 0, 1, 2, or 3) nucleotides from the nucleotide sequence of the sense strand of the corresponding (the same) dsRNA agent. In some embodiments, the antisense strand comprises at least 21 (e.g., 22, 23, 24, 25, 26, 27, 28, 29, 30 (e.g., 21, 22, 23 (e.g., 23))) contiguous nucleotides differing by no more than 3 (e.g., 0, 1, 2, or 3) nucleotides from the nucleotide sequence of the antisense strand of any one of dsRNA agents 1-482; and the sense strand comprises at least 19 (e.g., 20, 21, 22, 23, 24, 25, 26, 27, 28, 29, 30 (e.g., 19, 20, 21, 22, 23 (e.g., 21))) contiguous nucleotides differing by no more than 3 (e.g., 0, 1, 2, or 3) nucleotides from the nucleotide sequence of the sense strand of the corresponding (the same) dsRNA agent. In some embodiments, the antisense strand comprises at least 21 (e.g., 22, 23, 24, 25, 26, 27, 28, 29, 30 (e.g., 21, 22, 23 (e.g., 23))) contiguous nucleotides differing by no more than 3 (e.g., 0, 1, 2, or 3) nucleotides from the nucleotide sequence of the antisense strand of any one of dsRNA agents 1-482; and the sense strand comprises at least 21 (e.g., 22, 23, 24, 25, 26, 27, 28, 29, 30 (e.g., 21, 22, 23 (e.g., 21))) contiguous nucleotides differing by no more than 3 (e.g., 0, 1, 2, or 3) nucleotides from the nucleotide sequence of the sense strand of the corresponding (the same) dsRNA agent. In some embodiments, the antisense strand comprises at least 23 (e.g., 24, 25, 26, 27, 28, 29, 30 (e.g., 23)) contiguous nucleotides differing by no more than 3 (e.g., 0, 1, 2, or 3) nucleotides from the nucleotide sequence of the antisense strand of any one of dsRNA agents 1-482; and the sense strand comprises at least 21 (e.g., 22, 23, 24, 25, 26, 27, 28, 29, 30 (e.g., 21, 22, 23 (e.g., 21))) contiguous nucleotides differing by no more than 3 (e.g., 0, 1, 2, or 3) nucleotides from the nucleotide sequence of the sense strand of the corresponding (the same) dsRNA agent.

[0608] In some embodiments, the antisense strand comprises from about 15-23 (e.g., 15-22, 15-21, 15-20, 15-19, 15-18, 15-17, 15-16, 16-22, 16-20, 16-19, 16-18, 16-17, 17-23, 17-22, 17-21, 17-20, 17-19, 17-18, 18-23, 18-22, 18-21, 18-20, 18-19, 19-23, 19-22, 19-21, 19-20, 20-23, 20-22, 20-21, 21-23, 21-22, 22-23) contiguous nucleotides differing by no more than 3 (e.g., 0, 1, 2, or 3) nucleotides from the nucleotide sequence of the antisense strand of any one of dsRNA agents 1-482; and the sense strand comprises from about 15-23 (e.g., 15-22, 15-21, 15-20, 15-19, 15-18, 15-17, 15-16, 16-22, 16-20, 16-19, 16-18, 16-17, 17-23, 17-22, 17-21, 17-20, 17-19, 17-18, 18-23, 18-22, 18-21, 18-20, 18-19, 19-23, 19-22, 19-21, 19-20, 20-23, 20-22, 20-21, 21-23, 21-22, 22-23) contiguous nucleotides differing by no more than 3 (e.g., 0, 1, 2, or 3) nucleotides from the nucleotide sequence of the sense strand of the corresponding (the same) dsRNA agent. In some embodiments, the antisense strand comprises from about 19-23 (e.g., 19-22, 19-21, 19-20, 20-23, 20-22, 20-21, 21-23, 21-22, 22-23) contiguous nucleotides differing by no more than 3 (e.g., 0, 1, 2, or 3) nucleotides from the nucleotide sequence of the antisense strand of any one of dsRNA agents 1-482; and the sense strand comprises from about 19-23 (e.g., 19-22, 19-21, 19-20, 20-23, 20-22, 20-21, 21-23, 21-22, 22-23) contiguous nucleotides differing by no more than 3 (e.g., 0, 1, 2, or 3) nucleotides from the nucleotide sequence of the sense strand of the corresponding (the same) dsRNA agent. In some embodiments, the antisense strand comprises from about from about 21-23 (e.g., 21-22, 22-23) contiguous nucleotides differing by no more than 3 (e.g., 0, 1, 2, or 3) nucleotides from the nucleotide sequence of the antisense strand of any one of dsRNA agents 1-482; and the sense strand comprises from about 19-23 (e.g., 19-22, 19-21, 19-20, 20-23, 20-22, 20-21, 21-23, 21-22, 22-23) contiguous nucleotides differing by no more than 3 (e.g., 0, 1, 2, or 3) nucleotides from the nucleotide sequence of the sense strand of the corresponding (the same) dsRNA agent. In some embodiments, the antisense strand comprises from about 21-23 (e.g., 21-22, 22-23) contiguous nucleotides differing by no more than 3 (e.g., 0, 1, 2, or 3) nucleotides from the nucleotide sequence of the antisense strand of any one of dsRNA agents 1-482; and the sense strand comprises from about 21-23 (e.g., 21-22, 22-23) contiguous nucleotides differing by no more than 3 (e.g., 0, 1, 2, or 3) nucleotides from the nucleotide sequence of the sense strand of the corresponding (the same) dsRNA agent.

[0609] In some embodiments, the antisense strand comprises or consists of about 15, 16, 17, 18, 19, 20, 21, 22, 23, 24, 25, 26, 27, 28, 29, or 30 (e.g., 19, 20, 21, 22, 23 (e.g., 23)) contiguous nucleotides differing by no more than 3 (e.g., 0, 1, 2, or 3) nucleotides from the nucleotide sequence of the antisense strand of any one of dsRNA agents 1-482; and the sense strand comprises or consists of about 15, 16, 17, 18, 19, 20, 21, 22, 23, 24, 25, 26, 27, 28, 29, or 30 (e.g., 19, 20, 21, 22, 23 (e.g., 21)) contiguous nucleotides differing by no more than 3 (e.g., 0, 1, 2, or 3) nucleotides from the nucleotide sequence of the sense strand of the corresponding (the same) dsRNA agent. In some embodiments, the antisense strand comprises or consists of about 19, 20, 21, 22, 23, 24, 25, 26, 27, 28, 29, 30 (e.g., 19, 20, 21, 22, 23 (e.g., 23)) contiguous nucleotides differing by no more than 3 (e.g., 0, 1, 2, or 3) nucleotides from the nucleotide sequence of the antisense strand of any one of dsRNA agents 1-482; and the sense strand comprises or consists of 19, 20, 21, 22, 23, 24, 25, 26, 27, 28, 29, 30 (e.g., 19, 20, 21, 22, 23 (e.g., 21)) contiguous nucleotides differing by no more than 3 (e.g., 0, 1, 2, or 3) nucleotides from the nucleotide sequence of the sense strand of the corresponding (the same) dsRNA agent. In some embodiments, the antisense strand comprises or consists of about 21, 22, 23, 24, 25, 26, 27, 28, 29, 30 (e.g., 21, 22, 23 (e.g., 23)) contiguous nucleotides differing by no more than 3 (e.g., 0, 1, 2, or 3) nucleotides from the nucleotide sequence of the antisense strand of any one of dsRNA agents 1-482; and the sense strand comprises or consists of about 19, 20, 21, 22, 23, 24, 25, 26, 27, 28, 29, 30 (e.g., 19, 20, 21, 22, 23 (e.g., 21)) contiguous nucleotides differing by no more than 3 (e.g., 0, 1, 2, or 3) nucleotides from the nucleotide sequence of the sense strand of the corresponding (the same) dsRNA agent. In some embodiments, the antisense strand comprises or consists of about 21, 22, 23, 24, 25, 26, 27, 28, 29, 30 (e.g., 21, 22, 23 (e.g., 23)) contiguous nucleotides differing by no more than 3 (e.g., 0, 1, 2, or 3) nucleotides from the nucleotide sequence of the antisense strand of any one of dsRNA agents 1-482; and the sense strand comprises or consists of at about 21, 22, 23, 24, 25, 26, 27, 28, 29, 30 (e.g., 21, 22, 23 (e.g., 21)) contiguous nucleotides differing by no more than 3 (e.g., 0, 1, 2, or 3) nucleotides from the nucleotide sequence of the sense strand of the corresponding (the same) dsRNA agent. In some embodiments, the antisense strand comprises or consists of about 23, 24, 25, 26, 27, 28, 29, 30 (e.g., 23) contiguous nucleotides differing by no more than 3 (e.g., 0, 1, 2, or 3) nucleotides from the nucleotide sequence of the antisense strand of any one of dsRNA agents 1-482; and the sense strand comprises or consists of about 21, 22, 23, 24, 25, 26, 27, 28, 29, 30 (e.g., 21, 22, 23 (e.g., 21)) contiguous nucleotides differing by no more than 3 (e.g., 0, 1, 2, or 3) nucleotides from the nucleotide sequence of the sense strand of the corresponding (the same) dsRNA agent. In some embodiments, the antisense strand comprises or consists of about 23 contiguous nucleotides differing by no more than 3 (e.g., 0, 1, 2, or 3) nucleotides from the nucleotide sequence of the antisense strand of any one of dsRNA agents 1-482; and the sense strand comprises or consists of about 21 contiguous nucleotides differing by no more than 3 (e.g., 0, 1, 2, or 3) nucleotides from the nucleotide sequence of the sense strand of the corresponding (the same) dsRNA agent. In some embodiments, the antisense strand comprises or consists of about 21 contiguous nucleotides differing by no more than 3 (e.g., 0, 1, 2, or 3) nucleotides from the nucleotide sequence of the antisense strand of any one of dsRNA agents 1-482; and the sense strand comprises or consists of about 19 contiguous nucleotides differing by no more than 3 (e.g., 0, 1, 2, or 3) nucleotides from the nucleotide sequence of the sense strand of the corresponding (the same) dsRNA agent.

[0610] In some embodiments, the nucleotide sequence of the antisense strand comprises or consists of the nucleotide sequence of the antisense strand of any one of dsRNA agents 1-482 differing by no more than 3 (e.g., 0, 1, 2, or 3) nucleotides from the antisense strand set forth in any one of the dsRNA agents 1-482; and the nucleotide sequence of the sense strand comprises or consists of the nucleotide sequence of the sense strand of the corresponding (the same) dsRNA agent differing by no more than 3 (e.g., 0, 1, 2, or 3) nucleotides from the sense strand set forth in the corresponding (the same) dsRNA agent.

[0611] In some embodiments, the nucleotide sequence of the antisense strand comprises or consists of the nucleotide sequence the antisense strand of any one of dsRNA agents 1-482; and the nucleotide sequence of the sense strand comprises or consists of the nucleotide sequence of the sense strand of the corresponding (the same) dsRNA agent.

[0612] In some embodiments, the nucleotide sequence of the antisense strand differs by no more than 5 (e.g., 0, 1, 2, 3, 4, or 5) nucleotides from the nucleotide sequence of any one of the antisense strands of any one of dsRNA agents 129, 135, 169, 170, 409, 479, 480, 481, or 482; and the nucleotide sequence of the sense strand differs by no more than 5 (e.g., 0, 1, 2, 3, 4, or 5) nucleotides from the nucleotide sequence of the sense strand of the corresponding (the same) dsRNA agent. In some embodiments, the nucleotide sequence of the antisense strand differs by no more than 3 (e.g., 0, 1, 2, or 3) nucleotides from the nucleotide sequence of any one of the antisense strands of any one of dsRNA agents 129, 135, 169, 170, 409, 479, 480, 481, or 482; and the nucleotide sequence of the sense strand differs by no more than 3 (e.g., 0, 1, 2, or 3) nucleotides from the nucleotide sequence of the sense strand of the corresponding (the same) dsRNA agent. In some embodiments, the nucleotide sequence of the antisense strand differs by no more than 2 (e.g., 0, 1, or 2) nucleotides from the nucleotide sequence of any one of the antisense strands of any one of dsRNA agents 129, 135, 169, 170, 409, 479, 480, 481, or 482; and the nucleotide sequence of the sense strand differs by no more than 2 (e.g., 0, 1, or 2) nucleotides from the nucleotide sequence the sense strand of the corresponding (the same) dsRNA agent. In some embodiments, the nucleotide sequence of the antisense strand differs by no more than 1 (e.g., 0 or 1) nucleotide from the nucleotide sequence of any one of the antisense strands of any one of dsRNA agents 129, 135, 169, 170, 409, 479, 480, 481, or 482; and the nucleotide sequence of the sense strand differs by no more than 1 (e.g., 0 or 1) nucleotide from the nucleotide sequence of the sense strand of the corresponding (the same) dsRNA agent.

[0613] In some embodiments, the nucleotide sequence of the antisense strand comprises the nucleotide sequence of any one of the antisense strands of any one of dsRNA agents 129, 135, 169, 170, 409, 479, 480, 481, or 482 differing by no more than 5 (e.g., 0, 1, 2, 3, 4, or 5) nucleotides from the antisense strand of any one of dsRNA agents 129, 135, 169, 170, 409, 479, 480, 481, or 482; and the nucleotide sequence of the sense strand comprises the nucleotide sequence of the corresponding (the same) dsRNA agent differing by no more than 5 (e.g., 0, 1, 2, 3, 4, or 5) nucleotides from the sense strand of the corresponding (the same) dsRNA agent. In some embodiments, the nucleotide sequence of the antisense strand comprises the nucleotide sequence of any one of the antisense strands of any one of dsRNA agents 129, 135, 169, 170, 409, 479, 480, 481, or 482 differing by no more than 3 (e.g., 0, 1, 2, or 3) nucleotides from the antisense strand of any one of dsRNA agents 129, 135, 169, 170, 409, 479, 480, 481, or 482; and the nucleotide sequence of the sense strand comprises the nucleotide sequence of any one of the sense strand of the corresponding (the same) dsRNA agent differing by no more than 3 (e.g., 0, 1, 2, or 3) nucleotides from the sense strand of the corresponding (the same) dsRNA agent. In some embodiments, the nucleotide sequence of the antisense strand comprises the nucleotide sequence of any one of the antisense strands of any one of dsRNA agents 129, 135, 169, 170, 409, 479, 480, 481, or 482 differing by no more than 2 (e.g., 0, 1, or 2) nucleotides from the antisense strand of any one of dsRNA agents 129, 135, 169, 170, 409, 479, 480, 481, or 482; and the nucleotide sequence of the sense strand comprises the nucleotide sequence of any one of the sense strands of the corresponding (the same) dsRNA agent differing by no more than 2 (e.g., 0, 1, or 2) nucleotides from the sense strand of the corresponding (the same) dsRNA agent. In some embodiments, the nucleotide sequence of the antisense strand comprises the nucleotide sequence of any one of the antisense strands of any one of dsRNA agents 129, 135, 169, 170, 409, 479, 480, 481, or 482 differing by no more than 1 (e.g., 0 or 1) nucleotide from the antisense strand of any one of dsRNA agents 129, 135, 169, 170, 409, 479, 480, 481, or 482; and the nucleotide sequence of the sense strand comprises the nucleotide sequence of any one of the sense strand of the corresponding (the same) dsRNA agent differing by no more than 1 (e.g., 0 or 1) nucleotide from the sense strand of the corresponding (the same) dsRNA agent.

[0614] In some embodiments, the nucleotide sequence of the antisense strand is at least 85%, 86%, 87%, 88%, 89%, 90%, 91%, 92%, 93%, 94%, 95%, 96%, 97%, 98%, 99% or 100% identical to the nucleotide sequence of any one of the antisense strands of any one of dsRNA agents 129, 135, 169, 170, 409, 479, 480, 481, or 482; and the nucleotide sequence of the sense strand is at least 85%, 86%, 87%, 88%, 89%, 90%, 91%, 92%, 93%, 94%, 95%, 96%, 97%, 98%, 99% or 100% identical to the nucleotide sequence of the sense strand of the corresponding (the same) dsRNA agent. In some embodiments, the nucleotide sequence of the antisense strand is at least 90%, 91%, 92%, 93%, 94%, 95%, 96%, 97%, 98%, 99% or 100% identical to the nucleotide sequence of any one of the antisense strands of any one of dsRNA agents 129, 135, 169, 170, 409, 479, 480, 481, or 482; and the nucleotide sequence of the sense strand is at least 90%, 91%, 92%, 93%, 94%, 95%, 96%, 97%, 98%, 99% or 100% identical to the nucleotide sequence of the sense strand of the corresponding (the same) dsRNA agent. In some embodiments, the nucleotide sequence of the antisense strand is at least 95%, 96%, 97%, 98%, 99% or 100% identical to the nucleotide sequence of any one of the antisense strands of any one of dsRNA agents 129, 135, 169, 170, 409, 479, 480, 481, or 482; and the nucleotide sequence of the sense strand is at least 95%, 96%, 97%, 98%, 99% or 100% identical to the nucleotide sequence of the sense strand of the corresponding (the same) dsRNA agent. In some embodiments, the nucleotide sequence of the antisense strand is at least 96%, 97%, 98%, 99% or 100% identical to the nucleotide sequence of any one of the antisense strands of any one of dsRNA agents 129, 135, 169, 170, 409, 479, 480, 481, or 482; and the nucleotide sequence of the sense strand is at least 96%, 97%, 98%, 99% or 100% identical to the nucleotide sequence of the sense strand of the corresponding (the same) dsRNA agent. In some embodiments, the nucleotide sequence of the antisense strand is at least 97%, identical to the nucleotide sequence of any one of the antisense strands of any one of dsRNA agents 129, 135, 169, 170, 409, 479, 480, 481, or 482; and the nucleotide sequence of the sense strand is at least 97%, identical to the nucleotide sequence of the sense strand of the corresponding (the same) dsRNA agent. In some embodiments, the nucleotide sequence of the antisense strand is at least 98% identical to the nucleotide sequence of any one of the antisense strands of any one of dsRNA agents 129, 135, 169, 170, 409, 479, 480, 481, or 482; and the nucleotide sequence of the sense strand is at least 98% identical to the nucleotide sequence of the sense strand of the corresponding (the same) dsRNA agent. In some embodiments, the nucleotide sequence of the antisense strand is at least 99% identical to the nucleotide sequence of any one of the antisense strands of any one of dsRNA agents 129, 135, 169, 170, 409, 479, 480, 481, or 482; and the nucleotide sequence of the sense strand is at least 99% identical to the nucleotide sequence of the sense strand of the corresponding (the same) dsRNA agent. In some embodiments, the nucleotide sequence of the antisense strand is 100% identical to the nucleotide sequence of any one of the antisense strands of any one of dsRNA agents 129, 135, 169, 170, 409, 479, 480, 481, or 482; and the nucleotide sequence of the sense strand is 100% identical to the nucleotide sequence of the sense strand of the corresponding (the same) dsRNA agent.

[0615] In some embodiments, the nucleotide sequence of the antisense strand comprises the nucleotide sequence of any one of the antisense strands of any one of dsRNA agents 129, 135, 169, 170, 409, 479, 480, 481, or 482; and the nucleotide sequence of the sense strand comprises the nucleotide sequence of the sense strand of the corresponding (the same) dsRNA agent. In some embodiments, the nucleotide sequence of the antisense strand consists of the nucleotide sequence of any one of the antisense strands of any one of dsRNA agents 129, 135, 169, 170, 409, 479, 480, 481, or 482; and the nucleotide sequence of the sense strand consists of the nucleotide sequence of the sense strand of the corresponding (the same) dsRNA agent.

[0616] In some embodiments, the antisense strand comprises at least 15 (e.g., 15, 16, 17, 18, 19, 20, 21, 22, 23, 24, 25, 26, 27, 28, 29, 30 (e.g., 19, 20, 21, 22, 23 (e.g., 23))) contiguous nucleotides differing by no more than 3 (e.g., 0, 1, 2, or 3) nucleotides from the nucleotide sequence of the antisense strand of any one of dsRNA agents 129, 135, 169, 170, 409, 479, 480, 481, or 482; and the sense strand comprises at least 15 (e.g., 15, 16, 17, 18, 19, 20, 21, 22, 23, 24, 25, 26, 27, 28, 29, 30 (e.g., 19, 20, 21, 22, 23 (e.g., 21))) contiguous nucleotides differing by no more than 3 (e.g., 0, 1, 2, or 3) nucleotides from the nucleotide sequence of the sense strand of the corresponding (the same) dsRNA agent. In some embodiments, the antisense strand comprises at least 19 (e.g., 20, 21, 22, 23, 24, 25, 26, 27, 28, 29, 30 (e.g., 19, 20, 21, 22, 23 (e.g., 23))) contiguous nucleotides differing by no more than 3 (e.g., 0, 1, 2, or 3) nucleotides from the nucleotide sequence of the antisense strand of any one of dsRNA agents 129, 135, 169, 170, 409, 479, 480, 481, or 482; and the sense strand comprises at least 19 (e.g., 20, 21, 22, 23, 24, 25, 26, 27, 28, 29, 30 (e.g., 19, 20, 21, 22, 23 (e.g., 21))) contiguous nucleotides differing by no more than 3 (e.g., 0, 1, 2, or 3) nucleotides from the nucleotide sequence of the sense strand of the corresponding (the same) dsRNA agent. In some embodiments, the antisense strand comprises at least 21 (e.g., 22, 23, 24, 25, 26, 27, 28, 29, 30 (e.g., 21, 22, 23 (e.g., 23))) contiguous nucleotides differing by no more than 3 (e.g., 0, 1, 2, or 3) nucleotides from the nucleotide sequence of the antisense strand of any one of dsRNA agents 129, 135, 169, 170, 409, 479, 480, 481, or 482; and the sense strand comprises at least 19 (e.g., 20, 21, 22, 23, 24, 25, 26, 27, 28, 29, 30 (e.g., 19, 20, 21, 22, 23 (e.g., 21))) contiguous nucleotides differing by no more than 3 (e.g., 0, 1, 2, or 3) nucleotides from the nucleotide sequence of the sense strand of the corresponding (the same) dsRNA agent. In some embodiments, the antisense strand comprises at least 21 (e.g., 22, 23, 24, 25, 26, 27, 28, 29, 30 (e.g., 21, 22, 23 (e.g., 23))) contiguous nucleotides differing by no more than 3 (e.g., 0, 1, 2, or 3) nucleotides from the nucleotide sequence of the antisense strand of any one of dsRNA agents 129, 135, 169, 170, 409, 479, 480, 481, or 482; and the sense strand comprises at least 21 (e.g., 22, 23, 24, 25, 26, 27, 28, 29, 30 (e.g., 21, 22, 23 (e.g., 21))) contiguous nucleotides differing by no more than 3 (e.g., 0, 1, 2, or 3) nucleotides from the nucleotide sequence of the sense strand of the corresponding (the same) dsRNA agent. In some embodiments, the antisense strand comprises at least 23 (e.g., 24, 25, 26, 27, 28, 29, 30 (e.g., 23)) contiguous nucleotides differing by no more than 3 (e.g., 0, 1, 2, or 3) nucleotides from the nucleotide sequence of the antisense strand of any one of dsRNA agents 129, 135, 169, 170, 409, 479, 480, 481, or 482; and the sense strand comprises at least 21 (e.g., 22, 23, 24, 25, 26, 27, 28, 29, 30 (e.g., 21, 22, 23 (e.g., 21))) contiguous nucleotides differing by no more than 3 (e.g., 0, 1, 2, or 3) nucleotides from the nucleotide sequence of the sense strand of the corresponding (the same) dsRNA agent.

[0617] In some embodiments, the antisense strand comprises from about 15-23 (e.g., 15-22, 15-21, 15-20, 15-19, 15-18, 15-17, 15-16, 16-22, 16-20, 16-19, 16-18, 16-17, 17-23, 17-22, 17-21, 17-20, 17-19, 17-18, 18-23, 18-22, 18-21, 18-20, 18-19, 19-23, 19-22, 19-21, 19-20, 20-23, 20-22, 20-21, 21-23, 21-22, 22-23) contiguous nucleotides differing by no more than 3 (e.g., 0, 1, 2, or 3) nucleotides from the nucleotide sequence of the antisense strand of any one of dsRNA agents 129, 135, 169, 170, 409, 479, 480, 481, or 482; and the sense strand comprises from about 15-23 (e.g., 15-22, 15-21, 15-20, 15-19, 15-18, 15-17, 15-16, 16-22, 16-20, 16-19, 16-18, 16-17, 17-23, 17-22, 17-21, 17-20, 17-19, 17-18, 18-23, 18-22, 18-21, 18-20, 18-19, 19-23, 19-22, 19-21, 19-20, 20-23, 20-22, 20-21, 21-23, 21-22, 22-23) contiguous nucleotides differing by no more than 3 (e.g., 0, 1, 2, or 3) nucleotides from the nucleotide sequence of the sense strand of the corresponding (the same) dsRNA agent. In some embodiments, the antisense strand comprises from about 19-23 (e.g., 19-22, 19-21, 19-20, 20-23, 20-22, 20-21, 21-23, 21-22, 22-23) contiguous nucleotides differing by no more than 3 (e.g., 0, 1, 2, or 3) nucleotides from the nucleotide sequence of the antisense strand of any one of dsRNA agents 129, 135, 169, 170, 409, 479, 480, 481, or 482; and the sense strand comprises from about 19-23 (e.g., 19-22, 19-21, 19-20, 20-23, 20-22, 20-21, 21-23, 21-22, 22-23) contiguous nucleotides differing by no more than 3 (e.g., 0, 1, 2, or 3) nucleotides from the nucleotide sequence of the sense strand of the corresponding (the same) dsRNA agent. In some embodiments, the antisense strand comprises from about from about 21-23 (e.g., 21-22, 22-23) contiguous nucleotides differing by no more than 3 (e.g., 0, 1, 2, or 3) nucleotides from the nucleotide sequence of the antisense strand of any one of dsRNA agents 129, 135, 169, 170, 409, 479, 480, 481, or 482; and the sense strand comprises from about 19-23 (e.g., 19-22, 19-21, 19-20, 20-23, 20-22, 20-21, 21-23, 21-22, 22-23) contiguous nucleotides differing by no more than 3 (e.g., 0, 1, 2, or 3) nucleotides from the nucleotide sequence of the sense strand of the corresponding (the same) dsRNA agent. In some embodiments, the antisense strand comprises from about 21-23 (e.g., 21-22, 22-23) contiguous nucleotides differing by no more than 3 (e.g., 0, 1, 2, or 3) nucleotides from the nucleotide sequence of the antisense strand of any one of dsRNA agents 129, 135, 169, 170, 409, 479, 480, 481, or 482; and the sense strand comprises from about 21-23 (e.g., 21-22, 22-23) contiguous nucleotides differing by no more than 3 (e.g., 0, 1, 2, or 3) nucleotides from the nucleotide sequence of the sense strand of the corresponding (the same) dsRNA agent.

[0618] In some embodiments, the antisense strand comprises or consists of about 15, 16, 17, 18, 19, 20, 21, 22, 23, 24, 25, 26, 27, 28, 29, or 30 (e.g., 19, 20, 21, 22, 23 (e.g., 23)) contiguous nucleotides differing by no more than 3 (e.g., 0, 1, 2, or 3) nucleotides from the nucleotide sequence of the antisense strand of any one of dsRNA agents 129, 135, 169, 170, 409, 479, 480, 481, or 482; and the sense strand comprises or consists of about 15, 16, 17, 18, 19, 20, 21, 22, 23, 24, 25, 26, 27, 28, 29, or 30 (e.g., 19, 20, 21, 22, 23 (e.g., 21)) contiguous nucleotides differing by no more than 3 (e.g., 0, 1, 2, or 3) nucleotides from the nucleotide sequence of the sense strand of the corresponding (the same) dsRNA agent. In some embodiments, the antisense strand comprises or consists of about 19, 20, 21, 22, 23, 24, 25, 26, 27, 28, 29, 30 (e.g., 19, 20, 21, 22, 23 (e.g., 23)) contiguous nucleotides differing by no more than 3 (e.g., 0, 1, 2, or 3) nucleotides from the nucleotide sequence of the antisense strand of any one of dsRNA agents 129, 135, 169, 170, 409, 479, 480, 481, or 482; and the sense strand comprises or consists of 19, 20, 21, 22, 23, 24, 25, 26, 27, 28, 29, 30 (e.g., 19, 20, 21, 22, 23 (e.g., 21)) contiguous nucleotides differing by no more than 3 (e.g., 0, 1, 2, or 3) nucleotides from the nucleotide sequence of the sense strand of the corresponding (the same) dsRNA agent. In some embodiments, the antisense strand comprises or consists of about 21, 22, 23, 24, 25, 26, 27, 28, 29, 30 (e.g., 21, 22, 23 (e.g., 23)) contiguous nucleotides differing by no more than 3 (e.g., 0, 1, 2, or 3) nucleotides from the nucleotide sequence of the antisense strand of any one of dsRNA agents 129, 135, 169, 170, 409, 479, 480, 481, or 482; and the sense strand comprises or consists of about 19, 20, 21, 22, 23, 24, 25, 26, 27, 28, 29, 30 (e.g., 19, 20, 21, 22, 23 (e.g., 21)) contiguous nucleotides differing by no more than 3 (e.g., 0, 1, 2, or 3) nucleotides from the nucleotide sequence of the sense strand of the corresponding (the same) dsRNA agent. In some embodiments, the antisense strand comprises or consists of about 21, 22, 23, 24, 25, 26, 27, 28, 29, 30 (e.g., 21, 22, 23 (e.g., 23)) contiguous nucleotides differing by no more than 3 (e.g., 0, 1, 2, or 3) nucleotides from the nucleotide sequence of the antisense strand of any one of dsRNA agents 129, 135, 169, 170, 409, 479, 480, 481, or 482; and the sense strand comprises or consists of at about 21, 22, 23, 24, 25, 26, 27, 28, 29, 30 (e.g., 21, 22, 23 (e.g., 21)) contiguous nucleotides differing by no more than 3 (e.g., 0, 1, 2, or 3) nucleotides from the nucleotide sequence of the sense strand of the corresponding (the same) dsRNA agent. In some embodiments, the antisense strand comprises or consists of about 23, 24, 25, 26, 27, 28, 29, 30 (e.g., 23) contiguous nucleotides differing by no more than 3 (e.g., 0, 1, 2, or 3) nucleotides from the nucleotide sequence of the antisense strand of any one of dsRNA agents 129, 135, 169, 170, 409, 479, 480, 481, or 482; and the sense strand comprises or consists of about 21, 22, 23, 24, 25, 26, 27, 28, 29, 30 (e.g., 21, 22, 23 (e.g., 21)) contiguous nucleotides differing by no more than 3 (e.g., 0, 1, 2, or 3) nucleotides from the nucleotide sequence of the sense strand of the corresponding (the same) dsRNA agent. In some embodiments, the antisense strand comprises or consists of about 23 contiguous nucleotides differing by no more than 3 (e.g., 0, 1, 2, or 3) nucleotides from the nucleotide sequence of the antisense strand of any one of dsRNA agents 129, 135, 169, 170, 409, 479, 480, 481, or 482; and the sense strand comprises or consists of about 21 contiguous nucleotides differing by no more than 3 (e.g., 0, 1, 2, or 3) nucleotides from the nucleotide sequence of the sense strand of the corresponding (the same) dsRNA agent. In some embodiments, the antisense strand comprises or consists of about 21 contiguous nucleotides differing by no more than 3 (e.g., 0, 1, 2, or 3) nucleotides from the nucleotide sequence of the antisense strand of any one of dsRNA agents 129, 135, 169, 170, 409, 479, 480, 481, or 482; and the sense strand comprises or consists of about 19 contiguous nucleotides differing by no more than 3 (e.g., 0, 1, 2, or 3) nucleotides from the nucleotide sequence of the sense strand of the corresponding (the same) dsRNA agent.

[0619] In some embodiments, the nucleotide sequence of the antisense strand comprises or consists of the nucleotide sequence of the antisense strand of any one of dsRNA agents 129, 135, 169, 170, 409, 479, 480, 481, or 482 differing by no more than 3 (e.g., 0, 1, 2, or 3) nucleotides from the antisense strand set forth in any one of the dsRNA agents 169, 129, 170, 175, 134, 204, 218, 135, 238, 167, 137, 233, 148, 152, 130, 166, 136, 149, 151, or 172; and the nucleotide sequence of the sense strand comprises or consists of the nucleotide sequence of the sense strand of the corresponding (the same) dsRNA agent differing by no more than 3 (e.g., 0, 1, 2, or 3) nucleotides from the sense strand set forth in the corresponding (the same) dsRNA agent.

[0620] In some embodiments, the nucleotide sequence of the antisense strand comprises or consists of the nucleotide sequence the antisense strand of any one of dsRNA agents 129, 135, 169, 170, 409, 479, 480, 481, or 482; and the nucleotide sequence of the sense strand comprises or consists of the nucleotide sequence of the sense strand of the corresponding (the same) dsRNA agent.

[0621] In some embodiments, the dsRNA agent is any one of dsRNA agents 1-482. In specific embodiments the dsRNA agent is any one of dsRNA agents 129, 135, 169, 170, 409, 479, 480, 481, or 482. In specific embodiments the dsRNA agent is dsRNA agent 129. In specific embodiments the dsRNA agent is dsRNA agent 135. In specific embodiments the dsRNA agent is dsRNA agent 169. In specific embodiments the dsRNA agent is dsRNA agent 170. In specific embodiments the dsRNA agent is dsRNA agent 409. In specific embodiments the dsRNA agent is dsRNA agent 479. In specific embodiments the dsRNA agent is dsRNA agent 479. In specific embodiments the dsRNA agent is dsRNA agent 480. In specific embodiments the dsRNA agent is dsRNA agent 481. In specific embodiments the dsRNA agent is dsRNA agent 482.

[0622] In some embodiments, the sense strand comprises at least 15 (e.g., 16, 17, 18, 19, 20, 21) contiguous nucleotides differing by no more than 3 (e.g., 0, 1, 2, or 3) nucleotides from nucleotides 50-90, 60-90, 68-106, 81-103, 138-190, 169-206, 232-254, 230-300, 280-312, 298-327, 444-498, 510-538, 521-558, 560-617, 692-778, 720-750, 740-780, 750-790, 760-780, 880-920, 890-940, 890-950, 920-970, 930-980, 961-1037, 1035-1060, 1105-1133, 1171-1213, 1216-1287, 1220-1270, 1294-1346, 1366-1400, 1370-1410, 1360-1400, 1470-1510, 1410-1460, 1520-1560, 1580-1620, 1640-1680, 1640-1690, 1670-1710, 1700-1740, 1700-1745, 1724-1753, 1750-1790, 1757-1812, 1770-1810, 1833-1864, 1880-1920, 1900-1940, 1900-1927, 1915-1966, 2010-2060, 2020-2060, 2030-2070, 2082-2110, 2080-2120, 2090-2130, 2130-2170, 2143-2198, 2197-2225, 2210-2250, 2215-2260, 2240-2280, 2250-2280, 2250-2290, or 2260-2290 of SEQ ID NO: 1; and the antisense strand comprises at least 15 (e.g., 16, 17, 18, 19, 20, 21, 22, or 23) contiguous nucleotides differing by no more than 3 (e.g., 0, 1, 2, or 3) nucleotides from the corresponding complementary nucleotide sequence of SEQ ID NO: 2. In some embodiments, the sense strand comprises at least 19 (e.g., 20, 21) contiguous nucleotides differing by no more than 3 (e.g., 0, 1, 2, or 3) nucleotides from nucleotides 50-90, 60-90, 68-106, 81-103, 138-190, 169-206, 232-254, 230-300, 280-312, 298-327, 444-498, 510-538, 521-558, 560-617, 692-778, 720-750, 740-780, 750-790, 760-780, 880-920, 890-940, 890-950, 920-970, 930-980, 961-1037, 1035-1060, 1105-1133, 1171-1213, 1216-1287, 1220-1270, 1294-1346, 1366-1400, 1370-1410, 1360-1400, 1470-1510, 1410-1460, 1520-1560, 1580-1620, 1640-1680, 1640-1690, 1670-1710, 1700-1740, 1700-1745, 1724-1753, 1750-1790, 1757-1812, 1770-1810, 1833-1864, 1880-1920, 1900-1940, 1900-1927, 1915-1966, 2010-2060, 2020-2060, 2030-2070, 2082-2110, 2080-2120, 2090-2130, 2130-2170, 2143-2198, 2197-2225, 2210-2250, 2215-2260, 2240-2280, 2250-2280, 2250-2290, or 2260-2290 of SEQ ID NO: 1; and the antisense strand comprises at least 19 (e.g., 20, 21, 22, or 23) contiguous nucleotides differing by no more than 3 (e.g., 0, 1, 2, or 3) nucleotides from the corresponding complementary nucleotide sequence of SEQ ID NO: 2. In some embodiments, the sense strand comprises at least 21 contiguous nucleotides differing by no more than 3 (e.g., 0, 1, 2, or 3) nucleotides from nucleotides 50-90, 60-90, 68-106, 81-103, 138-190, 169-206, 232-254, 230-300, 280-312, 298-327, 444-498, 510-538, 521-558, 560-617, 692-778, 720-750, 740-780, 750-790, 760-780, 880-920, 890-940, 890-950, 920-970, 930-980, 961-1037, 1035-1060, 1105-1133, 1171-1213, 1216-1287, 1220-1270, 1294-1346, 1366-1400, 1370-1410, 1360-1400, 1470-1510, 1410-1460, 1520-1560, 1580-1620, 1640-1680, 1640-1690, 1670-1710, 1700-1740, 1700-1745, 1724-1753, 1750-1790, 1757-1812, 1770-1810, 1833-1864, 1880-1920, 1900-1940, 1900-1927, 1915-1966, 2010-2060, 2020-2060, 2030-2070, 2082-2110, 2080-2120, 2090-2130, 2130-2170, 2143-2198, 2197-2225, 2210-2250, 2215-2260, 2240-2280, 2250-2280, 2250-2290, or 2260-2290 of SEQ ID NO: 1; and the antisense strand comprises at least 21 (e.g., 22 or 23) contiguous nucleotides differing by no more than 3 (e.g., 0, 1, 2, or 3) nucleotides from the corresponding complementary nucleotide sequence of SEQ ID NO: 2. In some embodiments, the sense strand comprises at least 21 contiguous nucleotides differing by no more than 3 (e.g., 0, 1, 2, or 3) nucleotides from nucleotides 50-90, 60-90, 68-106, 81-103, 138-190, 169-206, 232-254, 230-300, 280-312, 298-327, 444-498, 510-538, 521-558, 560-617, 692-778, 720-750, 740-780, 750-790, 760-780, 880-920, 890-940, 890-950, 920-970, 930-980, 961-1037, 1035-1060, 1105-1133, 1171-1213, 1216-1287, 1220-1270, 1294-1346, 1366-1400, 1370-1410, 1360-1400, 1470-1510, 1410-1460, 1520-1560, 1580-1620, 1640-1680, 1640-1690, 1670-1710, 1700-1740, 1700-1745, 1724-1753, 1750-1790, 1757-1812, 1770-1810, 1833-1864, 1880-1920, 1900-1940, 1900-1927, 1915-1966, 2010-2060, 2020-2060, 2030-2070, 2082-2110, 2080-2120, 2090-2130, 2130-2170, 2143-2198, 2197-2225, 2210-2250, 2215-2260, 2240-2280, 2250-2280, 2250-2290, or 2260-2290 of SEQ ID NO: 1; and the antisense strand comprises at least 21 (e.g., 22 or 23) contiguous nucleotides differing by no more than 3 (e.g., 0, 1, 2, or 3) nucleotides from the corresponding complementary nucleotide sequence of SEQ ID NO: 2. In some embodiments, the sense strand comprises at least 21 contiguous nucleotides differing by no more than 3 (e.g., 0, 1, 2, or 3) nucleotides from nucleotides 50-90, 60-90, 68-106, 81-103, 138-190, 169-206, 232-254, 230-300, 280-312, 298-327, 444-498, 510-538, 521-558, 560-617, 692-778, 720-750, 740-780, 750-790, 760-780, 880-920, 890-940, 890-950, 920-970, 930-980, 961-1037, 1035-1060, 1105-1133, 1171-1213, 1216-1287, 1220-1270, 1294-1346, 1366-1400, 1370-1410, 1360-1400, 1470-1510, 1410-1460, 1520-1560, 1580-1620, 1640-1680, 1640-1690, 1670-1710, 1700-1740, 1700-1745, 1724-1753, 1750-1790, 1757-1812, 1770-1810, 1833-1864, 1880-1920, 1900-1940, 1900-1927, 1915-1966, 2010-2060, 2020-2060, 2030-2070, 2082-2110, 2080-2120, 2090-2130, 2130-2170, 2143-2198, 2197-2225, 2210-2250, 2215-2260, 2240-2280, 2250-2280, 2250-2290, or 2260-2290 of SEQ ID NO: 1; and the antisense strand comprises at least 23 contiguous nucleotides differing by no more than 3 (e.g., 0, 1, 2, or 3) nucleotides from the corresponding complementary nucleotide sequence of SEQ ID NO: 2.

[0623] In some embodiments, the sense strand comprises from about 15-23 (e.g., 15-22, 15-21, 15-20, 15-19, 15-18, 15-17, 15-16, 16-22, 16-20, 16-19, 16-18, 16-17, 17-23, 17-22, 17-21, 17-20, 17-19, 17-18, 18-23, 18-22, 18-21, 18-20, 18-19, 19-23, 19-22, 19-21, 19-20, 20-23, 20-22, 20-21, 21-23, 21-22, 22-23) contiguous nucleotides differing by no more than 3 (e.g., 0, 1, 2, or 3) nucleotides from nucleotides 50-90, 60-90, 68-106, 81-103, 138-190, 169-206, 232-254, 230-300, 280-312, 298-327, 444-498, 510-538, 521-558, 560-617, 692-778, 720-750, 740-780, 750-790, 760-780, 880-920, 890-940, 890-950, 920-970, 930-980, 961-1037, 1035-1060, 1105-1133, 1171-1213, 1216-1287, 1220-1270, 1294-1346, 1366-1400, 1370-1410, 1360-1400, 1470-1510, 1410-1460, 1520-1560, 1580-1620, 1640-1680, 1640-1690, 1670-1710, 1700-1740, 1700-1745, 1724-1753, 1750-1790, 1757-1812, 1770-1810, 1833-1864, 1880-1920, 1900-1940, 1900-1927, 1915-1966, 2010-2060, 2020-2060, 2030-2070, 2082-2110, 2080-2120, 2090-2130, 2130-2170, 2143-2198, 2197-2225, 2210-2250, 2215-2260, 2240-2280, 2250-2280, 2250-2290, or 2260-2290 of SEQ ID NO: 1; and the antisense strand comprises from about 15-23 (e.g., 15-22, 15-21, 15-20, 15-19, 15-18, 15-17, 15-16, 16-22, 16-20, 16-19, 16-18, 16-17, 17-23, 17-22, 17-21, 17-20, 17-19, 17-18, 18-23, 18-22, 18-21, 18-20, 18-19, 19-23, 19-22, 19-21, 19-20, 20-23, 20-22, 20-21, 21-23, 21-22, 22-23) contiguous nucleotides differing by no more than 3 (e.g., 0, 1, 2, or 3) nucleotides from the corresponding complementary nucleotide sequence of SEQ ID NO: 2. In some embodiments, the sense strand comprises from about 19-23 (e.g., 19-22, 19-21, 19-20, 20-23, 20-22, 20-21, 21-23, 21-22, 22-23) contiguous nucleotides differing by no more than 3 (e.g., 0, 1, 2, or 3) nucleotides from nucleotides 50-90, 60-90, 68-106, 81-103, 138-190, 169-206, 232-254, 230-300, 280-312, 298-327, 444-498, 510-538, 521-558, 560-617, 692-778, 720-750, 740-780, 750-790, 760-780, 880-920, 890-940, 890-950, 920-970, 930-980, 961-1037, 1035-1060, 1105-1133, 1171-1213, 1216-1287, 1220-1270, 1294-1346, 1366-1400, 1370-1410, 1360-1400, 1470-1510, 1410-1460, 1520-1560, 1580-1620, 1640-1680, 1640-1690, 1670-1710, 1700-1740, 1700-1745, 1724-1753, 1750-1790, 1757-1812, 1770-1810, 1833-1864, 1880-1920, 1900-1940, 1900-1927, 1915-1966, 2010-2060, 2020-2060, 2030-2070, 2082-2110, 2080-2120, 2090-2130, 2130-2170, 2143-2198, 2197-2225, 2210-2250, 2215-2260, 2240-2280, 2250-2280, 2250-2290, or 2260-2290 of SEQ ID NO: 1; and the antisense strand comprises from about 19-23 (e.g., 19-22, 19-21, 19-20, 20-23, 20-22, 20-21, 21-23, 21-22, 22-23) contiguous nucleotides differing by no more than 3 (e.g., 0, 1, 2, or 3) nucleotides from the corresponding complementary nucleotide sequence of SEQ ID NO: 2. In some embodiments, the sense strand comprises from about from about 21-23 (e.g., 21-22, 22-23) contiguous nucleotides differing by no more than 3 (e.g., 0, 1, 2, or 3) nucleotides from nucleotides 50-90, 60-90, 68-106, 81-103, 138-190, 169-206, 232-254, 230-300, 280-312, 298-327, 444-498, 510-538, 521-558, 560-617, 692-778, 720-750, 740-780, 750-790, 760-780, 880-920, 890-940, 890-950, 920-970, 930-980, 961-1037, 1035-1060, 1105-1133, 1171-1213, 1216-1287, 1220-1270, 1294-1346, 1366-1400, 1370-1410, 1360-1400, 1470-1510, 1410-1460, 1520-1560, 1580-1620, 1640-1680, 1640-1690, 1670-1710, 1700-1740, 1700-1745, 1724-1753, 1750-1790, 1757-1812, 1770-1810, 1833-1864, 1880-1920, 1900-1940, 1900-1927, 1915-1966, 2010-2060, 2020-2060, 2030-2070, 2082-2110, 2080-2120, 2090-2130, 2130-2170, 2143-2198, 2197-2225, 2210-2250, 2215-2260, 2240-2280, 2250-2280, 2250-2290, or 2260-2290 of SEQ ID NO: 1; and the antisense strand comprises from about 19-23 (e.g., 19-22, 19-21, 19-20, 20-23, 20-22, 20-21, 21-23, 21-22, 22-23) contiguous nucleotides differing by no more than 3 (e.g., 0, 1, 2, or 3) nucleotides from the corresponding complementary nucleotide sequence of SEQ ID NO: 2. In some embodiments, the sense strand comprises from about 21-23 (e.g., 21-22, 22-23) contiguous nucleotides differing by no more than 3 (e.g., 0, 1, 2, or 3) nucleotides from 50-90, 60-90, 68-106, 81-103, 138-190, 169-206, 232-254, 230-300, 280-312, 298-327, 444-498, 510-538, 521-558, 560-617, 692-778, 720-750, 740-780, 750-790, 760-780, 880-920, 890-940, 890-950, 920-970, 930-980, 961-1037, 1035-1060, 1105-1133, 1171-1213, 1216-1287, 1220-1270, 1294-1346, 1366-1400, 1370-1410, 1360-1400, 1470-1510, 1410-1460, 1520-1560, 1580-1620, 1640-1680, 1640-1690, 1670-1710, 1700-1740, 1700-1745, 1724-1753, 1750-1790, 1757-1812, 1770-1810, 1833-1864, 1880-1920, 1900-1940, 1900-1927, 1915-1966, 2010-2060, 2020-2060, 2030-2070, 2082-2110, 2080-2120, 2090-2130, 2130-2170, 2143-2198, 2197-2225, 2210-2250, 2215-2260, 2240-2280, 2250-2280, 2250-2290, or 2260-2290 of SEQ ID NO: 1; and the antisense strand comprises from about 21-23 (e.g., 21-22, 22-23) contiguous nucleotides differing by no more than 3 (e.g., 0, 1, 2, or 3) nucleotides from the corresponding complementary nucleotide sequence of SEQ ID NO: 2.

[0624] In some embodiments, the sense strand comprises or consists of about 15, 16, 17, 18, 19, 20, 21, 22, 23, 24, 25, 26, 27, 28, 29, or 30 (e.g., 19, 20, 21, 22, 23 (e.g., 23)) contiguous nucleotides differing by no more than 3 (e.g., 0, 1, 2, or 3) nucleotides from 50-90, 60-90, 68-106, 81-103, 138-190, 169-206, 232-254, 230-300, 280-312, 298-327, 444-498, 510-538, 521-558, 560-617, 692-778, 720-750, 740-780, 750-790, 760-780, 880-920, 890-940, 890-950, 920-970, 930-980, 961-1037, 1035-1060, 1105-1133, 1171-1213, 1216-1287, 1220-1270, 1294-1346, 1366-1400, 1370-1410, 1360-1400, 1470-1510, 1410-1460, 1520-1560, 1580-1620, 1640-1680, 1640-1690, 1670-1710, 1700-1740, 1700-1745, 1724-1753, 1750-1790, 1757-1812, 1770-1810, 1833-1864, 1880-1920, 1900-1940, 1900-1927, 1915-1966, 2010-2060, 2020-2060, 2030-2070, 2082-2110, 2080-2120, 2090-2130, 2130-2170, 2143-2198, 2197-2225, 2210-2250, 2215-2260, 2240-2280, 2250-2280, 2250-2290, or 2260-2290 of SEQ ID NO: 1; and the antisense strand comprises or consists of about 15, 16, 17, 18, 19, 20, 21, 22, 23, 24, 25, 26, 27, 28, 29, or 30 (e.g., 19, 20, 21, 22, 23 (e.g., 21)) contiguous nucleotides differing by no more than 3 (e.g., 0, 1, 2, or 3) nucleotides from the corresponding complementary nucleotide sequence of SEQ ID NO: 2. In some embodiments, the sense strand comprises or consists of about 19, 20, 21, 22, 23, 24, 25, 26, 27, 28, 29, 30 (e.g., 19, 20, 21, 22, 23 (e.g., 23)) contiguous nucleotides differing by no more than 3 (e.g., 0, 1, 2, or 3) nucleotides from nucleotides 50-90, 60-90, 68-106, 81-103, 138-190, 169-206, 232-254, 230-300, 280-312, 298-327, 444-498, 510-538, 521-558, 560-617, 692-778, 720-750, 740-780, 750-790, 760-780, 880-920, 890-940, 890-950, 920-970, 930-980, 961-1037, 1035-1060, 1105-1133, 1171-1213, 1216-1287, 1220-1270, 1294-1346, 1366-1400, 1370-1410, 1360-1400, 1470-1510, 1410-1460, 1520-1560, 1580-1620, 1640-1680, 1640-1690, 1670-1710, 1700-1740,1700-1745, 1724-1753, 1750-1790, 1757-1812, 1770-1810, 1833-1864, 1880-1920, 1900-1940, 1900-1927, 1915-1966, 2010-2060, 2020-2060, 2030-2070, 2082-2110, 2080-2120, 2090-2130, 2130-2170, 2143-2198, 2197-2225, 2210-2250, 2215-2260, 2240-2280, 2250-2280, 2250-2290, or 2260-2290 of SEQ ID NO: 1; and the antisense strand comprises or consists of 19, 20, 21, 22, 23, 24, 25, 26, 27, 28, 29, 30 (e.g., 19, 20, 21, 22, 23 (e.g., 21)) contiguous nucleotides differing by no more than 3 (e.g., 0, 1, 2, or 3) nucleotides from the corresponding complementary nucleotide sequence of SEQ ID NO: 2. In some embodiments, the sense strand comprises or consists of about 21, 22, 23, 24, 25, 26, 27, 28, 29, 30 (e.g., 21, 22, 23 (e.g., 23)) contiguous nucleotides differing by no more than 3 (e.g., 0, 1, 2, or 3) nucleotides from nucleotides 50-90, 60-90, 68-106, 81-103, 138-190, 169-206, 232-254, 230-300, 280-312, 298-327, 444-498, 510-538, 521-558, 560-617, 692-778, 720-750, 740-780, 750-790, 760-780, 880-920, 890-940, 890-950, 920-970, 930-980, 961-1037, 1035-1060, 1105-1133, 1171-1213, 1216-1287, 1220-1270, 1294-1346, 1366-1400, 1370-1410, 1360-1400, 1470-1510, 1410-1460, 1520-1560, 1580-1620, 1640-1680, 1640-1690, 1670-1710, 1700-1740, 1700-1745, 1724-1753, 1750-1790, 1757-1812, 1770-1810, 1833-1864, 1880-1920, 1900-1940, 1900-1927, 1915-1966, 2010-2060, 2020-2060, 2030-2070, 2082-2110, 2080-2120, 2090-2130, 2130-2170, 2143-2198, 2197-2225, 2210-2250, 2215-2260, 2240-2280, 2250-2280, 2250-2290, or 2260-2290 of SEQ ID NO: 1; and the antisense strand comprises or consists of about 19, 20, 21, 22, 23, 24, 25, 26, 27, 28, 29, 30 (e.g., 19, 20, 21, 22, 23 (e.g., 21)) contiguous nucleotides differing by no more than 3 (e.g., 0, 1, 2, or 3) nucleotides from the corresponding complementary nucleotide sequence of SEQ ID NO: 2. In some embodiments, the sense strand comprises or consists of about 21, 22, 23, 24, 25, 26, 27, 28, 29, 30 (e.g., 21, 22, 23 (e.g., 23)) contiguous nucleotides differing by no more than 3 (e.g., 0, 1, 2, or 3) nucleotides from nucleotides 50-90, 60-90, 68-106, 81-103, 138-190, 169-206, 232-254, 230-300, 280-312, 298-327, 444-498, 510-538, 521-558, 560-617, 692-778, 720-750, 740-780, 750-790, 760-780, 880-920, 890-940, 890-950, 920-970, 930-980, 961-1037, 1035-1060, 1105-1133, 1171-1213, 1216-1287, 1220-1270, 1294-1346, 1366-1400, 1370-1410, 1360-1400, 1470-1510, 1410-1460, 1520-1560, 1580-1620, 1640-1680, 1640-1690, 1670-1710, 1700-1740, 1700-1745, 1724-1753, 1750-1790, 1757-1812, 1770-1810, 1833-1864, 1880-1920, 1900-1940, 1900-1927, 1915-1966, 2010-2060, 2020-2060, 2030-2070, 2082-2110, 2080-2120, 2090-2130, 2130-2170, 2143-2198, 2197-2225, 2210-2250, 2215-2260, 2240-2280, 2250-2280, 2250-2290, or 2260-2290 of SEQ ID NO: 1; and the antisense strand comprises or consists of at about 21, 22, 23, 24, 25, 26, 27, 28, 29, 30 (e.g., 21, 22, 23 (e.g., 21)) contiguous nucleotides differing by no more than 3 (e.g., 0, 1, 2, or 3) nucleotides from the corresponding complementary nucleotide sequence of SEQ ID NO: 2. In some embodiments, the sense strand comprises or consists of about 23, 24, 25, 26, 27, 28, 29, 30 (e.g., 23) contiguous nucleotides differing by no more than 3 (e.g., 0, 1, 2, or 3) nucleotides from nucleotides 50-90, 60-90, 68-106, 81-103, 138-190, 169-206, 232-254, 230-300, 280-312, 298-327, 444-498, 510-538, 521-558, 560-617, 692-778, 720-750, 740-780, 750-790, 760-780, 880-920, 890-940, 890-950, 920-970, 930-980, 961-1037, 1035-1060, 1105-1133, 1171-1213, 1216-1287, 1220-1270, 1294-1346, 1366-1400, 1370-1410, 1360-1400, 1470-1510, 1410-1460, 1520-1560, 1580-1620, 1640-1680, 1640-1690, 1670-1710, 1700-1740, 1700-1745, 1724-1753, 1750-1790, 1757-1812, 1770-1810, 1833-1864, 1880-1920, 1900-1940, 1900-1927, 1915-1966, 2010-2060, 2020-2060, 2030-2070, 2082-2110, 2080-2120, 2090-2130, 2130-2170, 2143-2198, 2197-2225, 2210-2250, 2215-2260, 2240-2280, 2250-2280, 2250-2290, or 2260-2290 of SEQ ID NO: 1; and the antisense strand comprises or consists of about 21, 22, 23, 24, 25, 26, 27, 28, 29, 30 (e.g., 21, 22, 23 (e.g., 21)) contiguous nucleotides differing by no more than 3 (e.g., 0, 1, 2, or 3) nucleotides from the corresponding complementary nucleotide sequence of SEQ ID NO: 2. In some embodiments, the sense strand comprises or consists of about 23 contiguous nucleotides differing by no more than 3 (e.g., 0, 1, 2, or 3) nucleotides from nucleotides 50-90, 60-90, 68-106, 81-103, 138-190, 169-206, 232-254, 230-300, 280-312, 298-327, 444-498, 510-538, 521-558, 560-617, 692-778, 720-750, 740-780, 750-790, 760-780, 880-920, 890-940, 890-950, 920-970, 930-980, 961-1037, 1035-1060, 1105-1133, 1171-1213, 1216-1287, 1220-1270, 1294-1346, 1366-1400, 1370-1410, 1360-1400, 1470-1510, 1410-1460, 1520-1560, 1580-1620, 1640-1680, 1640-1690, 1670-1710, 1700-1740, 1700-1745, 1724-1753, 1750-1790, 1757-1812, 1770-1810, 1833-1864, 1880-1920, 1900-1940, 1900-1927, 1915-1966, 2010-2060, 2020-2060, 2030-2070, 2082-2110, 2080-2120, 2090-2130, 2130-2170, 2143-2198, 2197-2225, 2210-2250, 2215-2260, 2240-2280, 2250-2280, 2250-2290, or 2260-2290 of SEQ ID NO: 1; and the antisense strand comprises or consists of about 21 contiguous nucleotides differing by no more than 3 (e.g., 0, 1, 2, or 3) nucleotides from the corresponding complementary nucleotide sequence of SEQ ID NO: 2. In some embodiments, the sense strand comprises or consists of about 21 contiguous nucleotides differing by no more than 3 (e.g., 0, 1, 2, or 3) nucleotides from nucleotides 50-90, 60-90, 68-106, 81-103, 138-190, 169-206, 232-254, 230-300, 280-312, 298-327, 444-498, 510-538, 521-558, 560-617, 692-778, 720-750, 740-780, 750-790, 760-780, 880-920, 890-940, 890-950, 920-970, 930-980, 961-1037, 1035-1060, 1105-1133, 1171-1213, 1216-1287, 1220-1270, 1294-1346, 1366-1400, 1370-1410, 1360-1400, 1470-1510, 1410-1460, 1520-1560, 1580-1620, 1640-1680, 1640-1690, 1670-1710, 1700-1740, 1700-1745, 1724-1753, 1750-1790, 1757-1812, 1770-1810, 1833-1864, 1880-1920, 1900-1940, 1900-1927, 1915-1966, 2010-2060, 2020-2060, 2030-2070, 2082-2110, 2080-2120, 2090-2130, 2130-2170, 2143-2198, 2197-2225, 2210-2250, 2215-2260, 2240-2280, 2250-2280, 2250-2290, or 2260-2290 of SEQ ID NO: 1; and the antisense strand comprises or consists of about 19 contiguous nucleotides differing by no more than 3 (e.g., 0, 1, 2, or 3) nucleotides from the corresponding complementary nucleotide sequence of SEQ ID NO: 2.

[0625] In some embodiments, the sense strand comprises at least 15 (e.g., 16, 17, 18, 19, 20, 21) contiguous nucleotides differing by no more than 3 (e.g., 0, 1, 2, or 3) nucleotides from nucleotides 1225-1285, 1235-1275, 1240-1270, 1245-1265, 1227-1287, 1237-1277, 1242-1272, 1247-1267, 1231-1291, 1241-1261, 1246-1276, 1251-1271, 1235-1295, 1245-1265, 1250-1280, 1255-1275, 1353-1411, 1363-1381, 1368-1396, 1373-1391, 1762-1820, 1772-1810, 1757-1805, 1782-1800, 1912-1972, 1922-1942, 1927-1957, 1932-1952, 1922-1982, 1932-1972, 1937-1967, 1942-1962, 1923-1983, 1933-1973, 1938-1968, or 1943-1963 of SEQ ID NO: 1; and the antisense strand comprises at least 15 (e.g., 16, 17, 18, 19, 20, 21, 22, or 23) contiguous nucleotides differing by no more than 3 (e.g., 0, 1, 2, or 3) nucleotides from the corresponding complementary nucleotide sequence of SEQ ID NO: 2. In some embodiments, the sense strand comprises at least 19 (e.g., 20, 21) contiguous nucleotides differing by no more than 3 (e.g., 0, 1, 2, or 3) nucleotides from nucleotides 1225-1285, 1235-1275, 1240-1270, 1245-1265, 1227-1287, 1237-1277, 1242-1272, 1247-1267, 1231-1291, 1241-1261, 1246-1276, 1251-1271, 1235-1295, 1245-1265, 1250-1280, 1255-1275, 1353-1411, 1363-1381, 1368-1396, 1373-1391, 1762-1820, 1772-1810, 1757-1805, 1782-1800, 1912-1972, 1922-1942, 1927-1957, 1932-1952, 1922-1982, 1932-1972, 1937-1967, 1942-1962, 1923-1983, 1933-1973, 1938-1968, or 1943-1963 of SEQ ID NO: 1; and the antisense strand comprises at least 19 (e.g., 20, 21, 22, or 23) contiguous nucleotides differing by no more than 3 (e.g., 0, 1, 2, or 3) nucleotides from the corresponding complementary nucleotide sequence of SEQ ID NO: 2. In some embodiments, the sense strand comprises at least 21 contiguous nucleotides differing by no more than 3 (e.g., 0, 1, 2, or 3) nucleotides from nucleotides 1225-1285, 1235-1275, 1240-1270, 1245-1265, 1227-1287, 1237-1277, 1242-1272, 1247-1267, 1231-1291, 1241-1261, 1246-1276, 1251-1271, 1235-1295, 1245-1265, 1250-1280, 1255-1275, 1353-1411, 1363-1381, 1368-1396, 1373-1391, 1762-1820, 1772-1810, 1757-1805, 1782-1800, 1912-1972, 1922-1942, 1927-1957, 1932-1952, 1922-1982, 1932-1972, 1937-1967, 1942-1962, 1923-1983, 1933-1973, 1938-1968, or 1943-1963 of SEQ ID NO: 1; and the antisense strand comprises at least 21 (e.g., 22 or 23) contiguous nucleotides differing by no more than 3 (e.g., 0, 1, 2, or 3) nucleotides from the corresponding complementary nucleotide sequence of SEQ ID NO: 2. In some embodiments, the sense strand comprises at least 21 contiguous nucleotides differing by no more than 3 (e.g., 0, 1, 2, or 3) nucleotides from nucleotides 1225-1285, 1235-1275, 1240-1270, 1245-1265, 1227-1287, 1237-1277, 1242-1272, 1247-1267, 1231-1291, 1241-1261, 1246-1276, 1251-1271, 1235-1295, 1245-1265, 1250-1280, 1255-1275, 1353-1411, 1363-1381, 1368-1396, 1373-1391, 1762-1820, 1772-1810, 1757-1805, 1782-1800, 1912-1972, 1922-1942, 1927-1957, 1932-1952, 1922-1982, 1932-1972, 1937-1967, 1942-1962, 1923-1983, 1933-1973, 1938-1968, or 1943-1963 of SEQ ID NO: 1; and the antisense strand comprises at least 21 (e.g., 22 or 23) contiguous nucleotides differing by no more than 3 (e.g., 0, 1, 2, or 3) nucleotides from the corresponding complementary nucleotide sequence of SEQ ID NO: 2. In some embodiments, the sense strand comprises at least 21 contiguous nucleotides differing by no more than 3 (e.g., 0, 1, 2, or 3) nucleotides from nucleotides 1225-1285, 1235-1275, 1240-1270, 1245-1265, 1227-1287, 1237-1277, 1242-1272, 1247-1267, 1231-1291, 1241-1261, 1246-1276, 1251-1271, 1235-1295, 1245-1265, 1250-1280, 1255-1275, 1353-1411, 1363-1381, 1368-1396, 1373-1391, 1762-1820, 1772-1810, 1757-1805, 1782-1800, 1912-1972, 1922-1942, 1927-1957, 1932-1952, 1922-1982, 1932-1972, 1937-1967, 1942-1962, 1923-1983, 1933-1973, 1938-1968, or 1943-1963 of SEQ ID NO: 1; and the antisense strand comprises at least 23 contiguous nucleotides differing by no more than 3 (e.g., 0, 1, 2, or 3) nucleotides from the corresponding complementary nucleotide sequence of SEQ ID NO: 2.

[0626] In some embodiments, the sense strand comprises from about 15-23 (e.g., 15-22, 15-21, 15-20, 15-19, 15-18, 15-17, 15-16, 16-22, 16-20, 16-19, 16-18, 16-17, 17-23, 17-22, 17-21, 17-20, 17-19, 17-18, 18-23, 18-22, 18-21, 18-20, 18-19, 19-23, 19-22, 19-21, 19-20, 20-23, 20-22, 20-21, 21-23, 21-22, 22-23) contiguous nucleotides differing by no more than 3 (e.g., 0, 1, 2, or 3) nucleotides from nucleotides 1225-1285, 1235-1275, 1240-1270, 1245-1265, 1227-1287, 1237-1277, 1242-1272, 1247-1267, 1231-1291, 1241-1261, 1246-1276, 1251-1271, 1235-1295, 1245-1265, 1250-1280, 1255-1275, 1353-1411, 1363-1381, 1368-1396, 1373-1391, 1762-1820, 1772-1810, 1757-1805, 1782-1800, 1912-1972, 1922-1942, 1927-1957, 1932-1952, 1922-1982, 1932-1972, 1937-1967, 1942-1962, 1923-1983, 1933-1973, 1938-1968, or 1943-1963 of SEQ ID NO: 1; and the antisense strand comprises from about 15-23 (e.g., 15-22, 15-21, 15-20, 15-19, 15-18, 15-17, 15-16, 16-22, 16-20, 16-19, 16-18, 16-17, 17-23, 17-22, 17-21, 17-20, 17-19, 17-18, 18-23, 18-22, 18-21, 18-20, 18-19, 19-23, 19-22, 19-21, 19-20, 20-23, 20-22, 20-21, 21-23, 21-22, 22-23) contiguous nucleotides differing by no more than 3 (e.g., 0, 1, 2, or 3) nucleotides from the corresponding complementary nucleotide sequence of SEQ ID NO: 2. In some embodiments, the sense strand comprises from about 19-23 (e.g., 19-22, 19-21, 19-20, 20-23, 20-22, 20-21, 21-23, 21-22, 22-23) contiguous nucleotides differing by no more than 3 (e.g., 0, 1, 2, or 3) nucleotides from nucleotides 1225-1285, 1235-1275, 1240-1270, 1245-1265, 1227-1287, 1237-1277, 1242-1272, 1247-1267, 1231-1291, 1241-1261, 1246-1276, 1251-1271, 1235-1295, 1245-1265, 1250-1280, 1255-1275, 1353-1411, 1363-1381, 1368-1396, 1373-1391, 1762-1820, 1772-1810, 1757-1805, 1782-1800, 1912-1972, 1922-1942, 1927-1957, 1932-1952, 1922-1982, 1932-1972, 1937-1967, 1942-1962, 1923-1983, 1933-1973, 1938-1968, or 1943-1963 of SEQ ID NO: 1; and the antisense strand comprises from about 19-23 (e.g., 19-22, 19-21, 19-20, 20-23, 20-22, 20-21, 21-23, 21-22, 22-23) contiguous nucleotides differing by no more than 3 (e.g., 0, 1, 2, or 3) nucleotides from the corresponding complementary nucleotide sequence of SEQ ID NO: 2. In some embodiments, the sense strand comprises from about from about 21-23 (e.g., 21-22, 22-23) contiguous nucleotides differing by no more than 3 (e.g., 0, 1, 2, or 3) nucleotides from nucleotides 1225-1285, 1235-1275, 1240-1270, 1245-1265, 1227-1287, 1237-1277, 1242-1272, 1247-1267, 1231-1291, 1241-1261, 1246-1276, 1251-1271, 1235-1295, 1245-1265, 1250-1280, 1255-1275, 1353-1411, 1363-1381, 1368-1396, 1373-1391, 1762-1820, 1772-1810, 1757-1805, 1782-1800, 1912-1972, 1922-1942, 1927-1957, 1932-1952, 1922-1982, 1932-1972, 1937-1967, 1942-1962, 1923-1983, 1933-1973, 1938-1968, or 1943-1963 of SEQ ID NO: 1; and the antisense strand comprises from about 19-23 (e.g., 19-22, 19-21, 19-20, 20-23, 20-22, 20-21, 21-23, 21-22, 22-23) contiguous nucleotides differing by no more than 3 (e.g., 0, 1, 2, or 3) nucleotides from the corresponding complementary nucleotide sequence of SEQ ID NO: 2. In some embodiments, the sense strand comprises from about 21-23 (e.g., 21-22, 22-23) contiguous nucleotides differing by no more than 3 (e.g., 0, 1, 2, or 3) nucleotides from 1225-1285, 1235-1275, 1240-1270, 1245-1265, 1227-1287, 1237-1277, 1242-1272, 1247-1267, 1231-1291, 1241-1261, 1246-1276, 1251-1271, 1235-1295, 1245-1265, 1250-1280, 1255-1275, 1353-1411, 1363-1381, 1368-1396, 1373-1391, 1762-1820, 1772-1810, 1757-1805, 1782-1800, 1912-1972, 1922-1942, 1927-1957, 1932-1952, 1922-1982, 1932-1972, 1937-1967, 1942-1962, 1923-1983, 1933-1973, 1938-1968, or 1943-1963 of SEQ ID NO: 1; and the antisense strand comprises from about 21-23 (e.g., 21-22, 22-23) contiguous nucleotides differing by no more than 3 (e.g., 0, 1, 2, or 3) nucleotides from the corresponding complementary nucleotide sequence of SEQ ID NO: 2.

[0627] In some embodiments, the sense strand comprises or consists of about 15, 16, 17, 18, 19, 20, 21, 22, 23, 24, 25, 26, 27, 28, 29, or 30 (e.g., 19, 20, 21, 22, 23 (e.g., 23)) contiguous nucleotides differing by no more than 3 (e.g., 0, 1, 2, or 3) nucleotides from 1225-1285, 1235-1275, 1240-1270, 1245-1265, 1227-1287, 1237-1277, 1242-1272, 1247-1267, 1231-1291, 1241-1261, 1246-1276, 1251-1271, 1235-1295, 1245-1265, 1250-1280, 1255-1275, 1353-1411, 1363-1381, 1368-1396, 1373-1391, 1762-1820, 1772-1810, 1757-1805, 1782-1800, 1912-1972, 1922-1942, 1927-1957, 1932-1952, 1922-1982, 1932-1972, 1937-1967, 1942-1962, 1923-1983, 1933-1973, 1938-1968, or 1943-1963 of SEQ ID NO: 1; and the antisense strand comprises or consists of about 15, 16, 17, 18, 19, 20, 21, 22, 23, 24, 25, 26, 27, 28, 29, or 30 (e.g., 19, 20, 21, 22, 23 (e.g., 21)) contiguous nucleotides differing by no more than 3 (e.g., 0, 1, 2, or 3) nucleotides from the corresponding complementary nucleotide sequence of SEQ ID NO: 2. In some embodiments, the sense strand comprises or consists of about 19, 20, 21, 22, 23, 24, 25, 26, 27, 28, 29, 30 (e.g., 19, 20, 21, 22, 23 (e.g., 23)) contiguous nucleotides differing by no more than 3 (e.g., 0, 1, 2, or 3) nucleotides from nucleotides 1225-1285, 1235-1275, 1240-1270, 1245-1265, 1227-1287, 1237-1277, 1242-1272, 1247-1267, 1231-1291, 1241-1261, 1246-1276, 1251-1271, 1235-1295, 1245-1265, 1250-1280, 1255-1275, 1353-1411, 1363-1381, 1368-1396, 1373-1391, 1762-1820, 1772-1810, 1757-1805, 1782-1800, 1912-1972, 1922-1942, 1927-1957, 1932-1952, 1922-1982, 1932-1972, 1937-1967, 1942-1962, 1923-1983, 1933-1973, 1938-1968, or 1943-1963 of SEQ ID NO: 1; and the antisense strand comprises or consists of 19, 20, 21, 22, 23, 24, 25, 26, 27, 28, 29, 30 (e.g., 19, 20, 21, 22, 23 (e.g., 21)) contiguous nucleotides differing by no more than 3 (e.g., 0, 1, 2, or 3) nucleotides from the corresponding complementary nucleotide sequence of SEQ ID NO: 2. In some embodiments, the sense strand comprises or consists of about 21, 22, 23, 24, 25, 26, 27, 28, 29, 30 (e.g., 21, 22, 23 (e.g., 23)) contiguous nucleotides differing by no more than 3 (e.g., 0, 1, 2, or 3) nucleotides from nucleotides 1225-1285, 1235-1275, 1240-1270, 1245-1265, 1227-1287, 1237-1277, 1242-1272, 1247-1267, 1231-1291, 1241-1261, 1246-1276, 1251-1271, 1235-1295, 1245-1265, 1250-1280, 1255-1275, 1353-1411, 1363-1381, 1368-1396, 1373-1391, 1762-1820, 1772-1810, 1757-1805, 1782-1800, 1912-1972, 1922-1942, 1927-1957, 1932-1952, 1922-1982, 1932-1972, 1937-1967, 1942-1962, 1923-1983, 1933-1973, 1938-1968, or 1943-1963 of SEQ ID NO: 1; and the antisense strand comprises or consists of about 19, 20, 21, 22, 23, 24, 25, 26, 27, 28, 29, 30 (e.g., 19, 20, 21, 22, 23 (e.g., 21)) contiguous nucleotides differing by no more than 3 (e.g., 0, 1, 2, or 3) nucleotides from the corresponding complementary nucleotide sequence of SEQ ID NO: 2. In some embodiments, the sense strand comprises or consists of about 21, 22, 23, 24, 25, 26, 27, 28, 29, 30 (e.g., 21, 22, 23 (e.g., 23)) contiguous nucleotides differing by no more than 3 (e.g., 0, 1, 2, or 3) nucleotides from nucleotides 1225-1285, 1235-1275, 1240-1270, 1245-1265, 1227-1287, 1237-1277, 1242-1272, 1247-1267, 1231-1291, 1241-1261, 1246-1276, 1251-1271, 1235-1295, 1245-1265, 1250-1280, 1255-1275, 1353-1411, 1363-1381, 1368-1396, 1373-1391, 1762-1820, 1772-1810, 1757-1805, 1782-1800, 1912-1972, 1922-1942, 1927-1957, 1932-1952, 1922-1982, 1932-1972, 1937-1967, 1942-1962, 1923-1983, 1933-1973, 1938-1968, or 1943-1963 of SEQ ID NO: 1; and the antisense strand comprises or consists of at about 21, 22, 23, 24, 25, 26, 27, 28, 29, 30 (e.g., 21, 22, 23 (e.g., 21)) contiguous nucleotides differing by no more than 3 (e.g., 0, 1, 2, or 3) nucleotides from the corresponding complementary nucleotide sequence of SEQ ID NO: 2. In some embodiments, the sense strand comprises or consists of about 23, 24, 25, 26, 27, 28, 29, 30 (e.g., 23) contiguous nucleotides differing by no more than 3 (e.g., 0, 1, 2, or 3) nucleotides from nucleotides 1225-1285, 1235-1275, 1240-1270, 1245-1265, 1227-1287, 1237-1277, 1242-1272, 1247-1267, 1231-1291, 1241-1261, 1246-1276, 1251-1271, 1235-1295, 1245-1265, 1250-1280, 1255-1275, 1353-1411, 1363-1381, 1368-1396, 1373-1391, 1762-1820, 1772-1810, 1757-1805, 1782-1800, 1912-1972, 1922-1942, 1927-1957, 1932-1952, 1922-1982, 1932-1972, 1937-1967, 1942-1962, 1923-1983, 1933-1973, 1938-1968, or 1943-1963 of SEQ ID NO: 1; and the antisense strand comprises or consists of about 21, 22, 23, 24, 25, 26, 27, 28, 29, 30 (e.g., 21, 22, 23 (e.g., 21)) contiguous nucleotides differing by no more than 3 (e.g., 0, 1, 2, or 3) nucleotides from the corresponding complementary nucleotide sequence of SEQ ID NO: 2. In some embodiments, the sense strand comprises or consists of about 23 contiguous nucleotides differing by no more than 3 (e.g., 0, 1, 2, or 3) nucleotides from nucleotides 1225-1285, 1235-1275, 1240-1270, 1245-1265, 1227-1287, 1237-1277, 1242-1272, 1247-1267, 1231-1291, 1241-1261, 1246-1276, 1251-1271, 1235-1295, 1245-1265, 1250-1280, 1255-1275, 1353-1411, 1363-1381, 1368-1396, 1373-1391, 1762-1820, 1772-1810, 1757-1805, 1782-1800, 1912-1972, 1922-1942, 1927-1957, 1932-1952, 1922-1982, 1932-1972, 1937-1967, 1942-1962, 1923-1983, 1933-1973, 1938-1968, or 1943-1963 of SEQ ID NO: 1; and the antisense strand comprises or consists of about 21 contiguous nucleotides differing by no more than 3 (e.g., 0, 1, 2, or 3) nucleotides from the corresponding complementary nucleotide sequence of SEQ ID NO: 2. In some embodiments, the sense strand comprises or consists of about 21 contiguous nucleotides differing by no more than 3 (e.g., 0, 1, 2, or 3) nucleotides from nucleotides 1225-1285, 1235-1275, 1240-1270, 1245-1265, 1227-1287, 1237-1277, 1242-1272, 1247-1267, 1231-1291, 1241-1261, 1246-1276, 1251-1271, 1235-1295, 1245-1265, 1250-1280, 1255-1275, 1353-1411, 1363-1381, 1368-1396, 1373-1391, 1762-1820, 1772-1810, 1757-1805, 1782-1800, 1912-1972, 1922-1942, 1927-1957, 1932-1952, 1922-1982, 1932-1972, 1937-1967, 1942-1962, 1923-1983, 1933-1973, 1938-1968, or 1943-1963 of SEQ ID NO: 1; and the antisense strand comprises or consists of about 19 contiguous nucleotides differing by no more than 3 (e.g., 0, 1, 2, or 3) nucleotides from the corresponding complementary nucleotide sequence of SEQ ID NO: 2.

4.2.3.6 Exemplary dsRNA Agents

[0628] The nucleotide sequence of exemplary unmodified dsRNA agents comprising a sense and antisense strand (e.g., suitable for targeting hCIDEB, suitable for inhibiting hCIDEB expression)) are set forth in Table 2. More specifically, Table 2 sets forth the nucleotide sequence of exemplary sense strands, antisense strands, and dsRNA agent pairs of sense and antisense strands. It is to be understood that while the sense and antisense strands are set forth in pairs in Table 2, the disclosure encompasses dsRNA agents comprising any sense strand and any antisense set forth in Table 2 (e.g., that are at least partially complementary (e.g., as could be determined by a person of ordinary skill in the art)). It is to be understood that while the nucleotide sequence of the sense strands and antisense strands in Table 2 are set forth as unmodified (not containing any modified nucleotides), the disclosure encompasses the sense and antisense sense strands set forth in Table 2 comprising one or more modified nucleotide (e.g., as described herein).

TABLE 2
Unmodified Sense and Antisense Strand Sequences of
CIDEB dsRNA Agents.

| dsRNA | Sense | SEQ | | Antisense | SEQ | | mRNA | SEQ |
|---|---|---|---|---|---|---|---|---|
| Agent | Sequence | ID | Range in | Sequence | ID | Range in | Target | ID |
| ID | 5′ to 3′ | NO | NM_014430.4 | 5′ to 3′ | NO | NM_014430.4 | Sequence | NO |
| 1 | AGAGCAAGC | 4 | 63-83 | UGCUUGCCUU | 187 | 61-83 | CCAGAGCAAG | 370 |
| | CGAAGGCAA | | | CGGCUUGCUC | | | CCGAAGGCAA | |
| | GCA | | | UGG | | | GCA | |
| 2 | AAGCCGAAG | 5 | 68-88 | UAUCGUGCUU | 188 | 66-88 | GCAAGCCGAA | 371 |
| | GCAAGCACG | | | GCCUUCGGCU | | | GGCAAGCACG | |
| | AUA | | | UGC | | | AUG | |
| 3 | AGCCGAAGG | 6 | 69-89 | UCAUCGUGCU | 189 | 67-89 | CAAGCCGAAG | 372 |
| | CAAGCACGA | | | UGCCUUCGGC | | | GCAAGCACGA | |
| | UGA | | | UUG | | | UGG | |
| 4 | CCGAAGGCA | 7 | 71-91 | UGCCAUCGUG | 190 | 69-91 | AGCCGAAGGC | 373 |
| | AGCACGAUG | | | CUUGCCUUCG | | | AAGCACGAUG | |
| | GCA | | | GCU | | | GCG | |
| 5 | CGAAGGCAA | 8 | 72-92 | UCGCCAUCGU | 191 | 70-92 | GCCGAAGGCA | 374 |
| | GCACGAUGG | | | GCUUGCCUUC | | | AGCACGAUGG | |
| | CGA | | | GGC | | | CGC | |
| 6 | GGCAAGCAC | 9 | 76-96 | UUGAGCGCCA | 192 | 74-96 | AAGGCAAGCA | 375 |
| | GAUGGCGCU | | | UCGUGCUUGC | | | CGAUGGCGCU | |
| | CAA | | | CUU | | | CAC | |
| 7 | GCAAGCACG | 10 | 77-97 | UGUGAGCGCC | 193 | 75-97 | AGGCAAGCAC | 376 |
| | AUGGCGCUC | | | AUCGUGCUUG | | | GAUGGCGCUC | |
| | ACA | | | CCU | | | ACC | |
| 8 | CAAGCACGA | 11 | 78-98 | UGGUGAGCGC | 194 | 76-98 | GGCAAGCACG | 377 |
| | UGGCGCUCA | | | CAUCGUGCUU | | | AUGGCGCUCA | |
| | CCA | | | GCC | | | CCA | |
| 9 | AAGCACGAU | 12 | 79-99 | UUGGUGAGCG | 195 | 77-99 | GCAAGCACGA | 378 |
| | GGCGCUCAC | | | CCAUCGUGCU | | | UGGCGCUCAC | |
| | CAA | | | UGC | | | CAG | |
| 10 | ACGAUGGCG | 13 | 83-103 | UCGGCUGGUG | 196 | 81-103 | GCACGAUGGC | 379 |
| | CUCACCAGC | | | AGCGCCAUCG | | | GCUCACCAGC | |
| | CGA | | | UGC | | | CGG | |
| 11 | CCCCGCAGC | 14 | 143-163 | UACGCUGGCA | 197 | 141-163 | CGCCCCGCAG | 380 |
| | CGUGCCAGC | | | CGGCUGCGGG | | | CCGUGCCAGC | |
| | GUA | | | GCG | | | GUC | |
| 12 | GCAGCCGUG | 15 | 147-167 | UCGUGACGCU | 198 | 145-167 | CCGCAGCCGU | 381 |
| | CCAGCGUCA | | | GGCACGGCUG | | | GCCAGCGUCA | |
| | CGA | | | CGG | | | CGC | |
| 13 | CAGCCGUGC | 16 | 148-168 | UGCGUGACGC | 199 | 146-168 | CGCAGCCGUG | 382 |
| | CAGCGUCAC | | | UGGCACGGCU | | | CCAGCGUCAC | |
| | GCA | | | GCG | | | GCU | |
| 14 | AGCCGUGCC | 17 | 149-169 | UAGCGUGACG | 200 | 147-169 | GCAGCCGUGC | 383 |
| | AGCGUCACG | | | CUGGCACGGC | | | CAGCGUCACG | |
| | CUA | | | UGC | | | CUG | |
| 15 | GCCGUGCCA | 18 | 150-170 | UCAGCGUGAC | 201 | 148-170 | CAGCCGUGCC | 384 |
| | GCGUCACGC | | | GCUGGCACGG | | | AGCGUCACGC | |
| | UGA | | | CUG | | | UGU | |
| 16 | CGUGCCAGC | 19 | 152-172 | UUACAGCGUG | 202 | 150-172 | GCCGUGCCAG | 385 |
| | GUCACGCUG | | | ACGCUGGCAC | | | CGUCACGCUG | |
| | UAA | | | GGC | | | UAG | |
| 17 | GCCAGCGUC | 20 | 155-175 | UUGCUACAGC | 203 | 153-175 | GUGCCAGCGU | 386 |
| | ACGCUGUAG | | | GUGACGCUGG | | | CACGCUGUAG | |
| | CAA | | | CAC | | | CAG | |
| 18 | CCAGCGUCA | 21 | 156-176 | UCUGCUACAG | 204 | 154-176 | UGCCAGCGUC | 387 |
| | CGCUGUAGC | | | CGUGACGCUG | | | ACGCUGUAGC | |
| | AGA | | | GCA | | | AGC | |
| 19 | CAGCGUCAC | 22 | 157-177 | UGCUGCUACA | 205 | 155-177 | GCCAGCGUCA | 388 |
| | GCUGUAGCA | | | GCGUGACGCU | | | CGCUGUAGCA | |
| | GCA | | | GGC | | | GCC | |
| 20 | GCGUCACGC | 23 | 159-179 | UCGGCUGCUA | 206 | 157-179 | CAGCGUCACG | 389 |
| | UGUAGCAGC | | | CAGCGUGACG | | | CUGUAGCAGC | |
| | CGA | | | CUG | | | CGA | |
| 21 | CGUCACGCU | 24 | 160-180 | UUCGGCUGCU | 207 | 158-180 | AGCGUCACGC | 390 |
| | GUAGCAGCC | | | ACAGCGUGAC | | | UGUAGCAGCC | |
| | GAA | | | GCU | | | GAG | |
| 22 | GUCACGCUG | 25 | 161-181 | UCUCGGCUGC | 208 | 159-181 | GCGUCACGCU | 391 |
| | UAGCAGCCG | | | UACAGCGUGA | | | GUAGCAGCCG | |
| | AGA | | | CGC | | | AGC | |
| 23 | CACGCUGUA | 26 | 163-183 | UUGCUCGGCU | 209 | 161-183 | GUCACGCUGU | 392 |
| | GCAGCCGAG | | | GCUACAGCGU | | | AGCAGCCGAG | |
| | CAA | | | GAC | | | CAU | |
| 24 | ACGCUGUAG | 27 | 164-184 | UAUGCUCGGC | 210 | 162-184 | UCACGCUGUA | 393 |
| | CAGCCGAGC | | | UGCUACAGCG | | | GCAGCCGAGC | |
| | AUA | | | UGA | | | AUC | |
| 25 | GCUGUAGCA | 28 | 166-186 | UUGAUGCUCG | 211 | 164-186 | ACGCUGUAGC | 394 |
| | GCCGAGCAU | | | GCUGCUACAG | | | AGCCGAGCAU | |
| | CAA | | | CGU | | | CAG | |
| 26 | AGCCGAGCA | 29 | 174-194 | UUUUCGGGCU | 212 | 172-194 | GCAGCCGAGC | 395 |
| | UCAGCCCGA | | | GAUGCUCGGC | | | AUCAGCCCGA | |
| | AAA | | | UGC | | | AAG | |
| 27 | CGAGCAUCA | 30 | 177-197 | UUCCUUUCGG | 213 | 175-197 | GCCGAGCAUC | 396 |
| | GCCCGAAAG | | | GCUGAUGCUC | | | AGCCCGAAAG | |
| | GAA | | | GGC | | | GAA | |
| 28 | CAGCCCGAA | 31 | 184-204 | UUCGUGCUUC | 214 | 182-204 | AUCAGCCCGA | 397 |
| | AGGAAGCAC | | | CUUUCGGGCU | | | AAGGAAGCAC | |
| | GAA | | | GAU | | | GAA | |
| 29 | AGCCCGAAA | 32 | 185-205 | UUUCGUGCUU | 215 | 183-205 | UCAGCCCGAA | 398 |
| | GGAAGCACG | | | CCUUUCGGGC | | | AGGAAGCACG | |
| | AAA | | | UGA | | | AAA | |
| 30 | GCCCGAAAG | 33 | 186-206 | UUUUCGUGCU | 216 | 184-206 | CAGCCCGAAA | 399 |
| | GAAGCACGA | | | UCCUUUCGGG | | | GGAAGCACGA | |
| | AAA | | | CUG | | | AAG | |
| 31 | CGGCGGCGU | 34 | 234-254 | UGUCGCCGGU | 217 | 232-254 | GGCGGCGGCG | 400 |
| | GGACCGGCG | | | CCACGCCGCC | | | UGGACCGGCG | |
| | ACA | | | GCC | | | ACG | |
| 32 | GGCGGCGUG | 35 | 235-255 | UCGUCGCCGG | 218 | 233-255 | GCGGCGGCGU | 401 |
| | GACCGGCGA | | | UCCACGCCGC | | | GGACCGGCGA | |
| | CGA | | | CGC | | | CGG | |
| 33 | GCGGCGUGG | 36 | 236-256 | UCCGUCGCCG | 219 | 234-256 | CGGCGGCGUG | 402 |
| | ACCGGCGAC | | | GUCCACGCCG | | | GACCGGCGAC | |
| | GGA | | | CCG | | | GGG | |
| 34 | GUGGACCGG | 37 | 241-261 | UGCCACCCGU | 220 | 239-261 | GCGUGGACCG | 403 |
| | CGACGGGUG | | | CGCCGGUCCA | | | GCGACGGGUG | |
| | GCA | | | CGC | | | GCA | |
| 35 | UGGACCGGC | 38 | 242-262 | UUGCCACCCG | 221 | 240-262 | CGUGGACCGG | 404 |
| | GACGGGUGG | | | UCGCCGGUCC | | | CGACGGGUGG | |
| | CAA | | | ACG | | | CAC | |
| 36 | GGACCGGCG | 39 | 243-263 | UGUGCCACCC | 222 | 241-263 | GUGGACCGGC | 405 |
| | ACGGGUGGC | | | GUCGCCGGUC | | | GACGGGUGGC | |
| | ACA | | | CAC | | | ACA | |
| 37 | GACCGGCGA | 40 | 244-264 | UUGUGCCACC | 223 | 242-264 | UGGACCGGCG | 406 |
| | CGGGUGGCA | | | CGUCGCCGGU | | | ACGGGUGGCA | |
| | CAA | | | CCA | | | CAG | |
| 38 | CGGCGACGG | 41 | 247-267 | UAGCUGUGCC | 224 | 245-267 | ACCGGCGACG | 407 |
| | GUGGCACAG | | | ACCCGUCGCC | | | GGUGGCACAG | |
| | CUA | | | GGU | | | CUG | |
| 39 | GCGACGGGU | 42 | 249-269 | UCCAGCUGUG | 225 | 247-269 | CGGCGACGGG | 408 |
| | GGCACAGCU | | | CCACCCGUCG | | | UGGCACAGCU | |
| | GGA | | | CCG | | | GGC | |
| 40 | GGUGGCACA | 43 | 255-275 | UCGUAUGCCA | 226 | 253-275 | CGGGUGGCAC | 409 |
| | GCUGGCAUA | | | GCUGUGCCAC | | | AGCUGGCAUA | |
| | CGA | | | CCG | | | CGC | |
| 41 | GUGGCACAG | 44 | 256-276 | UGCGUAUGCC | 227 | 254-276 | GGGUGGCACA | 410 |
| | CUGGCAUAC | | | AGCUGUGCCA | | | GCUGGCAUAC | |
| | GCA | | | CCC | | | GCG | |
| 42 | UGGCACAGC | 45 | 257-277 | UCGCGUAUGC | 228 | 255-277 | GGUGGCACAG | 411 |
| | UGGCAUACG | | | CAGCUGUGCC | | | CUGGCAUACG | |
| | CGA | | | ACC | | | CGG | |
| 43 | CCUCCACAG | 46 | 280-300 | UUCUACCGCC | 229 | 278-300 | UCCCUCCACA | 412 |
| | GUGGCGGUA | | | ACCUGUGGAG | | | GGUGGCGGUA | |
| | GAA | | | GGA | | | GAC | |
| 44 | UCCACAGGU | 47 | 282-302 | UCGUCUACCG | 230 | 280-302 | CCUCCACAGG | 413 |
| | GGCGGUAGA | | | CCACCUGUGG | | | UGGCGGUAGA | |
| | CGA | | | AGG | | | CGG | |
| 45 | CACAGGUGG | 48 | 284-304 | UGCCGUCUAC | 231 | 282-304 | UCCACAGGUG | 414 |
| | CGGUAGACG | | | CGCCACCUGU | | | GCGGUAGACG | |
| | GCA | | | GGA | | | GCG | |
| 46 | GUGGCGGUA | 49 | 289-309 | UCGGCCGCCG | 232 | 287-309 | AGGUGGCGGU | 415 |
| | GACGGCGGC | | | UCUACCGCCA | | | AGACGGCGGC | |
| | CGA | | | CCU | | | CGG | |
| 47 | CGGCCGGGA | 50 | 303-323 | UGUUGCUCGC | 233 | 301-323 | GGCGGCCGGG | 416 |
| | CGGCGAGCA | | | CGUCCCGGCC | | | ACGGCGAGCA | |
| | ACA | | | GCC | | | ACA | |
| 48 | GGCCGGGAC | 51 | 304-324 | UUGUUGCUCG | 234 | 302-324 | GCGGCCGGGA | 417 |
| | GGCGAGCAA | | | CCGUCCCGGC | | | CGGCGAGCAA | |
| | CAA | | | CGC | | | CAG | |
| 49 | CUGGCGUAC | 52 | 449-469 | UGCGCUCAGC | 235 | 447-469 | CGCUGGCGUA | 418 |
| | AUGCUGAGC | | | AUGUACGCCA | | | CAUGCUGAGC | |
| | GCA | | | GCG | | | GCG | |
| 50 | UGGCGUACA | 53 | 450-470 | UCGCGCUCAG | 236 | 448-470 | GCUGGCGUAC | 419 |
| | UGCUGAGCG | | | CAUGUACGCC | | | AUGCUGAGCG | |
| | CGA | | | AGC | | | CGC | |
| 51 | GGCGUACAU | 54 | 451-471 | UGCGCGCUCA | 237 | 449-471 | CUGGCGUACA | 420 |
| | GCUGAGCGC | | | GCAUGUACGC | | | UGCUGAGCGC | |
| | GCA | | | CAG | | | GCA | |
| 52 | GCGUACAUG | 55 | 452-472 | UUGCGCGCUC | 238 | 450-472 | UGGCGUACAU | 421 |
| | CUGAGCGCG | | | AGCAUGUACG | | | GCUGAGCGCG | |
| | CAA | | | CCA | | | CAC | |
| 53 | GCUGAGCGC | 56 | 460-480 | UACUACGUGU | 239 | 458-480 | AUGCUGAGCG | 422 |
| | GCACACGUA | | | GCGCGCUCAG | | | CGCACACGUA | |
| | GUA | | | CAU | | | GUA | |
| 54 | CUGAGCGCG | 57 | 461-481 | UUACUACGUG | 240 | 459-481 | UGCUGAGCGC | 423 |
| | CACACGUAG | | | UGCGCGCUCA | | | GCACACGUAG | |
| | UAA | | | GCA | | | UAC | |
| 55 | GAGCGCGCA | 58 | 463-483 | UUGUACUACG | 241 | 461-483 | CUGAGCGCGC | 424 |
| | CACGUAGUA | | | UGUGCGCGCU | | | ACACGUAGUA | |
| | CAA | | | CAG | | | CAC | |
| 56 | CGCGCACAC | 59 | 466-486 | UCGGUGUACU | 242 | 464-486 | AGCGCGCACA | 425 |
| | GUAGUACAC | | | ACGUGUGCGC | | | CGUAGUACAC | |
| | CGA | | | GCU | | | CGC | |
| 57 | GCGCACACG | 60 | 467-487 | UGCGGUGUAC | 243 | 465-487 | GCGCGCACAC | 426 |
| | UAGUACACC | | | UACGUGUGCG | | | GUAGUACACC | |
| | GCA | | | CGC | | | GCC | |
| 58 | CGCACACGU | 61 | 468-488 | UGGCGGUGUA | 244 | 466-488 | CGCGCACACG | 427 |
| | AGUACACCG | | | CUACGUGUGC | | | UAGUACACCG | |
| | CCA | | | GCG | | | CCU | |
| 59 | GCACACGUA | 62 | 469-489 | UAGGCGGUGU | 245 | 467-489 | GCGCACACGU | 428 |
| | GUACACCGC | | | ACUACGUGUG | | | AGUACACCGC | |
| | CUA | | | CGC | | | CUU | |
| 60 | CACACGUAG | 63 | 470-490 | UAAGGCGGUG | 246 | 468-490 | CGCACACGUA | 429 |
| | UACACCGCC | | | UACUACGUGU | | | GUACACCGCC | |
| | UUA | | | GCG | | | UUG | |
| 61 | ACACGUAGU | 64 | 471-491 | UCAAGGCGGU | 247 | 469-491 | GCACACGUAG | 430 |
| | ACACCGCCU | | | GUACUACGUG | | | UACACCGCCU | |
| | UGA | | | UGC | | | UGC | |
| 62 | ACGUAGUAC | 65 | 473-493 | UUGCAAGGCG | 248 | 471-493 | ACACGUAGUA | 431 |
| | ACCGCCUUG | | | GUGUACUACG | | | CACCGCCUUG | |
| | CAA | | | UGU | | | CAG | |
| 63 | CGUAGUACA | 66 | 474-494 | UCUGCAAGGC | 249 | 472-494 | CACGUAGUAC | 432 |
| | CCGCCUUGC | | | GGUGUACUAC | | | ACCGCCUUGC | |
| | AGA | | | GUG | | | AGC | |
| 64 | GUAGUACAC | 67 | 475-495 | UGCUGCAAGG | 250 | 473-495 | ACGUAGUACA | 433 |
| | CGCCUUGCA | | | CGGUGUACUA | | | CCGCCUUGCA | |
| | GCA | | | CGU | | | GCC | |
| 65 | GCCUGCCGG | 68 | 515-535 | UGCCUUCCUG | 251 | 513-535 | AGGCCUGCCG | 434 |
| | GUCAGGAAG | | | ACCCGGCAGG | | | GGUCAGGAAG | |
| | GCA | | | CCU | | | GCC | |
| 66 | CAGGAAGGC | 69 | 526-546 | UCGCUCUUUG | 252 | 524-546 | GUCAGGAAGG | 435 |
| | CACAAAGAG | | | UGGCCUUCCU | | | CCACAAAGAG | |
| | CGA | | | GAC | | | CGG | |
| 67 | GGAAGGCCA | 70 | 528-548 | UGCCGCUCUU | 253 | 526-548 | CAGGAAGGCC | 436 |
| | CAAAGAGCG | | | UGUGGCCUUC | | | ACAAAGAGCG | |
| | GCA | | | CUG | | | GCG | |
| 68 | GAAGGCCAC | 71 | 529-549 | UCGCCGCUCU | 254 | 527-549 | AGGAAGGCCA | 437 |
| | AAAGAGCGG | | | UUGUGGCCUU | | | CAAAGAGCGG | |
| | CGA | | | CCU | | | CGU | |
| 69 | AAGGCCACA | 72 | 530-550 | UACGCCGCUC | 255 | 528-550 | GGAAGGCCAC | 438 |
| | AAGAGCGGC | | | UUUGUGGCCU | | | AAAGAGCGGC | |
| | GUA | | | UCC | | | GUG | |
| 70 | AGGCCACAA | 73 | 531-551 | UCACGCCGCU | 256 | 529-551 | GAAGGCCACA | 439 |
| | AGAGCGGCG | | | CUUUGUGGCC | | | AAGAGCGGCG | |
| | UGA | | | UUC | | | UGA | |
| 71 | GGCCACAAA | 74 | 532-552 | UUCACGCCGC | 257 | 530-552 | AAGGCCACAA | 440 |
| | GAGCGGCGU | | | UCUUUGUGGC | | | AGAGCGGCGU | |
| | GAA | | | CUU | | | GAG | |
| 72 | CCACAAAGA | 75 | 534-554 | UGCUCACGCC | 258 | 532-554 | GGCCACAAAG | 441 |
| | GCGGCGUGA | | | GCUCUUUGUG | | | AGCGGCGUGA | |
| | GCA | | | GCC | | | GCA | |
| 73 | CACAAAGAG | 76 | 535-555 | UUGCUCACGC | 259 | 533-555 | GCCACAAAGA | 442 |
| | CGGCGUGAG | | | CGCUCUUUGU | | | GCGGCGUGAG | |
| | CAA | | | GGC | | | CAG | |
| 74 | AGCACCGCG | 77 | 557-577 | UCUGGCCGAC | 260 | 555-577 | GCAGCACCGC | 443 |
| | CCGUCGGCC | | | GGCGCGGUGC | | | GCCGUCGGCC | |
| | AGA | | | UGC | | | AGC | |
| 75 | CGCGCCGUC | 78 | 562-582 | UUGGCGCUGG | 261 | 560-582 | ACCGCGCCGU | 444 |
| | GGCCAGCGC | | | CCGACGGCGC | | | CGGCCAGCGC | |
| | CAA | | | GGU | | | CAG | |
| 76 | GCGCCGUCG | 79 | 563-583 | UCUGGCGCUG | 262 | 561-583 | CCGCGCCGUC | 445 |
| | GCCAGCGCC | | | GCCGACGGCG | | | GGCCAGCGCC | |
| | AGA | | | CGG | | | AGG | |
| 77 | CAGCACAAG | 80 | 586-606 | UUGGCGGCCA | 263 | 584-606 | UGCAGCACAA | 446 |
| | CGUGGCCGC | | | CGCUUGUGCU | | | GCGUGGCCGC | |
| | CAA | | | GCA | | | CAG | |
| 78 | AGCACAAGC | 81 | 587-607 | UCUGGCGGCC | 264 | 585-607 | GCAGCACAAG | 447 |
| | GUGGCCGCC | | | ACGCUUGUGC | | | CGUGGCCGCC | |
| | AGA | | | UGC | | | AGC | |
| 79 | GCACAAGCG | 82 | 588-608 | UGCUGGCGGC | 265 | 586-608 | CAGCACAAGC | 448 |
| | UGGCCGCCA | | | CACGCUUGUG | | | GUGGCCGCCA | |
| | GCA | | | CUG | | | GCG | |
| 80 | CAAGCGUGG | 83 | 591-611 | UACCGCUGGC | 266 | 589-611 | CACAAGCGUG | 449 |
| | CCGCCAGCG | | | GGCCACGCUU | | | GCCGCCAGCG | |
| | GUA | | | GUG | | | GUC | |
| 81 | AAGCGUGGC | 84 | 592-612 | UGACCGCUGG | 267 | 590-612 | ACAAGCGUGG | 450 |
| | CGCCAGCGG | | | CGGCCACGCU | | | CCGCCAGCGG | |
| | UCA | | | UGU | | | UCG | |
| 82 | AGCGUGGCC | 85 | 593-613 | UCGACCGCUG | 268 | 591-613 | CAAGCGUGGC | 451 |
| | GCCAGCGGU | | | GCGGCCACGC | | | CGCCAGCGGU | |
| | CGA | | | UUG | | | CGC | |
| 83 | GCGUGGCCG | 86 | 594-614 | UGCGACCGCU | 269 | 592-614 | AAGCGUGGCC | 452 |
| | CCAGCGGUC | | | GGCGGCCACG | | | GCCAGCGGUC | |
| | GCA | | | CUU | | | GCC | |
| 84 | GGCUGUGCC | 87 | 697-717 | UCGCGGGCCA | 270 | 695-717 | AAGGCUGUGC | 453 |
| | UGUGGCCCG | | | CAGGCACAGC | | | CUGUGGCCCG | |
| | CGA | | | CUU | | | CGA | |
| 85 | GCCUGUGGC | 88 | 703-723 | UAGACUUCGC | 271 | 701-723 | GUGCCUGUGG | 454 |
| | CCGCGAAGU | | | GGGCCACAGG | | | CCCGCGAAGU | |
| | CUA | | | CAC | | | CUU | |
| 86 | CUGUGGCCC | 89 | 705-725 | UGAAGACUUC | 272 | 703-725 | GCCUGUGGCC | 455 |
| | GCGAAGUCU | | | GCGGGCCACA | | | CGCGAAGUCU | |
| | UCA | | | GGC | | | UCC | |
| 87 | GCCCGCGAA | 90 | 710-730 | UAGCUGGAAG | 273 | 708-730 | UGGCCCGCGA | 456 |
| | GUCUUCCAG | | | ACUUCGCGGG | | | AGUCUUCCAG | |
| | CUA | | | CCA | | | CUC | |
| 88 | CCCGCGAAG | 91 | 711-731 | UGAGCUGGAA | 274 | 709-731 | GGCCCGCGAA | 457 |
| | UCUUCCAGC | | | GACUUCGCGG | | | GUCUUCCAGC | |
| | UCA | | | GCC | | | UCA | |
| 89 | CCGCGAAGU | 92 | 712-732 | UUGAGCUGGA | 275 | 710-732 | GCCCGCGAAG | 458 |
| | CUUCCAGCU | | | AGACUUCGCG | | | UCUUCCAGCU | |
| | CAA | | | GGC | | | CAG | |
| 90 | UCCAGCUCA | 93 | 723-743 | UCGAGACACU | 276 | 721-743 | CUUCCAGCUC | 459 |
| | GCAGUGUCU | | | GCUGAGCUGG | | | AGCAGUGUCU | |
| | CGA | | | AAG | | | CGU | |
| 91 | CAGCUCAGC | 94 | 725-745 | UAACGAGACA | 277 | 723-745 | UCCAGCUCAG | 460 |
| | AGUGUCUCG | | | CUGCUGAGCU | | | CAGUGUCUCG | |
| | UUA | | | GGA | | | UUC | |
| 92 | GCGCACCAG | 95 | 944-964 | UGACUUUAGC | 278 | 942-964 | CAGCGCACCA | 461 |
| | AAGCUAAAG | | | UUCUGGUGCG | | | GAAGCUAAAG | |
| | UCA | | | CUG | | | UCU | |
| 93 | CAGAAGCUA | 96 | 950-970 | UCAUCAAGAC | 279 | 948-970 | ACCAGAAGCU | 462 |
| | AAGUCUUGA | | | UUUAGCUUCU | | | AAAGUCUUGA | |
| | UGA | | | GGU | | | UGC | |
| 94 | AGAAGCUAA | 97 | 951-971 | UGCAUCAAGA | 280 | 949-971 | CCAGAAGCUA | 463 |
| | AGUCUUGAU | | | CUUUAGCUUC | | | AAGUCUUGAU | |
| | GCA | | | UGG | | | GCC | |
| 95 | GAAGCUAAA | 98 | 952-972 | UGGCAUCAAG | 281 | 950-972 | CAGAAGCUAA | 464 |
| | GUCUUGAUG | | | ACUUUAGCUU | | | AGUCUUGAUG | |
| | CCA | | | CUG | | | CCA | |
| 96 | AAGCUAAAG | 99 | 953-973 | UUGGCAUCAA | 282 | 951-973 | AGAAGCUAAA | 465 |
| | UCUUGAUGC | | | GACUUUAGCU | | | GUCUUGAUGC | |
| | CAA | | | UCU | | | CAU | |
| 97 | GCUAAAGUC | 100 | 955-975 | UGAUGGCAUC | 283 | 953-975 | AAGCUAAAGU | 466 |
| | UUGAUGCCA | | | AAGACUUUAG | | | CUUGAUGCCA | |
| | UCA | | | CUU | | | UCA | |
| 98 | GAUGCCAUC | 101 | 966-986 | UGGAUGUCCU | 284 | 964-986 | UUGAUGCCAU | 467 |
| | AAAGGACAU | | | UUGAUGGCAU | | | CAAAGGACAU | |
| | CCA | | | CAA | | | CCC | |
| 99 | AUGCCAUCA | 102 | 967-987 | UGGGAUGUCC | 285 | 965-987 | UGAUGCCAUC | 468 |
| | AAGGACAUC | | | UUUGAUGGCA | | | AAAGGACAUC | |
| | CCA | | | UCA | | | CCU | |
| 100 | GCCAUCAAA | 103 | 969-989 | UCAGGGAUGU | 286 | 967-989 | AUGCCAUCAA | 469 |
| | GGACAUCCC | | | CCUUUGAUGG | | | AGGACAUCCC | |
| | UGA | | | CAU | | | UGC | |
| 101 | CAUCUCUGU | 104 | 998-1018 | UUAGUGGACG | 287 | 996-1018 | CACAUCUCUG | 470 |
| | CACGUCCAC | | | UGACAGAGAU | | | UCACGUCCAC | |
| | UAA | | | GUG | | | UAA | |
| 102 | AUCUCUGUC | 105 | 999-1019 | UUUAGUGGAC | 288 | 997-1019 | ACAUCUCUGU | 471 |
| | ACGUCCACU | | | GUGACAGAGA | | | CACGUCCACU | |
| | AAA | | | UGU | | | AAU | |
| 103 | UCUCUGUCA | 106 | 1000-1020 | UAUUAGUGGA | 289 | 998-1020 | CAUCUCUGUC | 472 |
| | CGUCCACUA | | | CGUGACAGAG | | | ACGUCCACUA | |
| | AUA | | | AUG | | | AUC | |
| 104 | CUCUGUCAC | 107 | 1001-1021 | UGAUUAGUGG | 290 | 999-1021 | AUCUCUGUCA | 473 |
| | GUCCACUAA | | | ACGUGACAGA | | | CGUCCACUAA | |
| | UCA | | | GAU | | | UCG | |
| 105 | UCUGUCACG | 108 | 1002-1022 | UCGAUUAGUG | 291 | 1000-1022 | UCUCUGUCAC | 474 |
| | UCCACUAAU | | | GACGUGACAG | | | GUCCACUAAU | |
| | CGA | | | AGA | | | CGG | |
| 106 | CUGUCACGU | 109 | 1003-1023 | UCCGAUUAGU | 292 | 1001-1023 | CUCUGUCACG | 475 |
| | CCACUAAUC | | | GGACGUGACA | | | UCCACUAAUC | |
| | GGA | | | GAG | | | GGC | |
| 107 | UGUCACGUC | 110 | 1004-1024 | UGCCGAUUAG | 293 | 1002-1024 | UCUGUCACGU | 476 |
| | CACUAAUCG | | | UGGACGUGAC | | | CCACUAAUCG | |
| | GCA | | | AGA | | | GCA | |
| 108 | GUCACGUCC | 111 | 1005-1025 | UUGCCGAUUA | 294 | 1003-1025 | CUGUCACGUC | 477 |
| | ACUAAUCGG | | | GUGGACGUGA | | | CACUAAUCGG | |
| | CAA | | | CAG | | | CAA | |
| 109 | UCACGUCCA | 112 | 1006-1026 | UUUGCCGAUU | 295 | 1004-1026 | UGUCACGUCC | 478 |
| | CUAAUCGGC | | | AGUGGACGUG | | | ACUAAUCGGC | |
| | AAA | | | ACA | | | AAA | |
| 110 | CACGUCCAC | 113 | 1007-1027 | UUUUGCCGAU | 296 | 1005-1027 | GUCACGUCCA | 479 |
| | UAAUCGGCA | | | UAGUGGACGU | | | CUAAUCGGCA | |
| | AAA | | | GAC | | | AAA | |
| 111 | CGUCCACUA | 114 | 1009-1029 | UCUUUUGCCG | 297 | 1007-1029 | CACGUCCACU | 480 |
| | AUCGGCAAA | | | AUUAGUGGAC | | | AAUCGGCAAA | |
| | AGA | | | GUG | | | AGG | |
| 112 | GUCCACUAA | 115 | 1010-1030 | UCCUUUUGCC | 298 | 1008-1030 | ACGUCCACUA | 481 |
| | UCGGCAAAA | | | GAUUAGUGGA | | | AUCGGCAAAA | |
| | GGA | | | CGU | | | GGA | |
| 113 | UCCACUAAU | 116 | 1011-1031 | UUCCUUUUGC | 299 | 1009-1031 | CGUCCACUAA | 482 |
| | CGGCAAAAG | | | CGAUUAGUGG | | | UCGGCAAAAG | |
| | GAA | | | ACG | | | GAG | |
| 114 | CCACUAAUC | 117 | 1012-1032 | UCUCCUUUUG | 300 | 1010-1032 | GUCCACUAAU | 483 |
| | GGCAAAAGG | | | CCGAUUAGUG | | | CGGCAAAAGG | |
| | AGA | | | GAC | | | AGA | |
| 115 | CACUAAUCG | 118 | 1013-1033 | UUCUCCUUUU | 301 | 1011-1033 | UCCACUAAUC | 484 |
| | GCAAAAGGA | | | GCCGAUUAGU | | | GGCAAAAGGA | |
| | GAA | | | GGA | | | GAA | |
| 116 | ACUAAUCGG | 119 | 1014-1034 | UUUCUCCUUU | 302 | 1012-1034 | CCACUAAUCG | 485 |
| | CAAAAGGAG | | | UGCCGAUUAG | | | GCAAAAGGAG | |
| | AAA | | | UGG | | | AAA | |
| 117 | GAGAAGAUG | 120 | 1040-1060 | UCACACUUAG | 303 | 1038-1060 | GAGAGAAGAU | 486 |
| | ACCUAAGUG | | | GUCAUCUUCU | | | GACCUAAGUG | |
| | UGA | | | CUC | | | UGA | |
| 118 | UCCUCCGAC | 121 | 1110-1130 | UCUUCCUCCU | 304 | 1108-1130 | CCUCCUCCGA | 487 |
| | CAAGGAGGA | | | UGGUCGGAGG | | | CCAAGGAGGA | |
| | AGA | | | AGG | | | AGG | |
| 119 | CCAGGGAAG | 122 | 1176-1196 | UCCGGAGAGU | 305 | 1174-1196 | UUCCAGGGAA | 488 |
| | GAACUCUCC | | | UCCUUCCCUG | | | GGAACUCUCC | |
| | GGA | | | GAA | | | GGU | |
| 120 | CAGGGAAGG | 123 | 1177-1197 | UACCGGAGAG | 306 | 1175-1197 | UCCAGGGAAG | 489 |
| | AACUCUCCG | | | UUCCUUCCCU | | | GAACUCUCCG | |
| | GUA | | | GGA | | | GUC | |
| 121 | AGGAACUCU | 124 | 1183-1203 | UUGGUGGACC | 307 | 1181-1203 | GAAGGAACUC | 490 |
| | CCGGUCCAC | | | GGAGAGUUCC | | | UCCGGUCCAC | |
| | CAA | | | UUC | | | CAU | |
| 122 | GGAACUCUC | 125 | 1184-1204 | UAUGGUGGAC | 308 | 1182-1204 | AAGGAACUCU | 491 |
| | CGGUCCACC | | | CGGAGAGUUC | | | CCGGUCCACC | |
| | AUA | | | CUU | | | AUG | |
| 123 | ACUCUCCGG | 126 | 1187-1207 | UUCCAUGGUG | 309 | 1185-1207 | GAACUCUCCG | 492 |
| | UCCACCAUG | | | GACCGGAGAG | | | GUCCACCAUG | |
| | GAA | | | UUC | | | GAG | |
| 124 | CUCCGGUCC | 127 | 1190-1210 | UUACUCCAUG | 310 | 1188-1210 | CUCUCCGGUC | 493 |
| | ACCAUGGAG | | | GUGGACCGGA | | | CACCAUGGAG | |
| | UAA | | | GAG | | | UAC | |
| 125 | UGAACCCCA | 128 | 1221-1241 | UGAGUAAGUC | 311 | 1219-1241 | UCUGAACCCC | 494 |
| | GUGACUUAC | | | ACUGGGGUUC | | | AGUGACUUAC | |
| | UCA | | | AGA | | | UCA | |
| 126 | GUGACUUAC | 129 | 1230-1250 | UUACUGACCU | 312 | 1228-1250 | CAGUGACUUA | 495 |
| | UCAGGUCAG | | | GAGUAAGUCA | | | CUCAGGUCAG | |
| | UAA | | | CUG | | | UAU | |
| 127 | GACUUACUC | 130 | 1232-1252 | UGAUACUGAC | 313 | 1230-1252 | GUGACUUACU | 496 |
| | AGGUCAGUA | | | CUGAGUAAGU | | | CAGGUCAGUA | |
| | UCA | | | CAC | | | UCU | |
| 128 | CUUACUCAG | 131 | 1234-1254 | UUAGAUACUG | 314 | 1232-1254 | GACUUACUCA | 497 |
| | GUCAGUAUC | | | ACCUGAGUAA | | | GGUCAGUAUC | |
| | UAA | | | GUC | | | UAA | |
| 129 | CAGUAUCUA | 132 | 1245-1265 | UCGAGCUUAU | 315 | 1243-1265 | GUCAGUAUCU | 498 |
| | AUAUAAGCU | | | AUUAGAUACU | | | AAUAUAAGCU | |
| | CGA | | | GAC | | | CGG | |
| 130 | GUAUCUAAU | 133 | 1247-1267 | UUCCGAGCUU | 316 | 1245-1267 | CAGUAUCUAA | 499 |
| | AUAAGCUCG | | | AUAUUAGAUA | | | UAUAAGCUCG | |
| | GAA | | | CUG | | | GAG | |
| 131 | UAUCUAAUA | 134 | 1248-1268 | UCUCCGAGCU | 317 | 1246-1268 | AGUAUCUAAU | 500 |
| | UAAGCUCGG | | | UAUAUUAGAU | | | AUAAGCUCGG | |
| | AGA | | | ACU | | | AGU | |
| 132 | AUCUAAUAU | 135 | 1249-1269 | UACUCCGAGC | 318 | 1247-1269 | GUAUCUAAUA | 501 |
| | AAGCUCGGA | | | UUAUAUUAGA | | | UAAGCUCGGA | |
| | GUA | | | UAC | | | GUU | |
| 133 | UCUAAUAUA | 136 | 1250-1270 | UAACUCCGAG | 319 | 1248-1270 | UAUCUAAUAU | 502 |
| | AGCUCGGAG | | | CUUAUAUUAG | | | AAGCUCGGAG | |
| | UUA | | | AUA | | | UUU | |
| 134 | CUAAUAUAA | 137 | 1251-1271 | UAAACUCCGA | 320 | 1249-1271 | AUCUAAUAUA | 503 |
| | GCUCGGAGU | | | GCUUAUAUUA | | | AGCUCGGAGU | |
| | UUA | | | GAU | | | UUG | |
| 135 | UAAUAUAAG | 138 | 1252-1272 | UCAAACUCCG | 321 | 1250-1272 | UCUAAUAUAA | 504 |
| | CUCGGAGUU | | | AGCUUAUAUU | | | GCUCGGAGUU | |
| | UGA | | | AGA | | | UGG | |
| 136 | AUAUAAGCU | 139 | 1254-1274 | UUCCAAACUC | 322 | 1252-1274 | UAAUAUAAGC | 505 |
| | CGGAGUUUG | | | CGAGCUUAUA | | | UCGGAGUUUG | |
| | GAA | | | UUA | | | GAC | |
| 137 | UAUAAGCUC | 140 | 1255-1275 | UGUCCAAACU | 323 | 1253-1275 | AAUAUAAGCU | 506 |
| | GGAGUUUGG | | | CCGAGCUUAU | | | CGGAGUUUGG | |
| | ACA | | | AUU | | | ACG | |
| 138 | AUAAGCUCG | 141 | 1256-1276 | UCGUCCAAAC | 324 | 1254-1276 | AUAUAAGCUC | 507 |
| | GAGUUUGGA | | | UCCGAGCUUA | | | GGAGUUUGGA | |
| | CGA | | | UAU | | | CGG | |
| 139 | GCUCGGAGU | 142 | 1260-1280 | UCCUCCGUCC | 325 | 1258-1280 | AAGCUCGGAG | 508 |
| | UUGGACGGA | | | AAACUCCGAG | | | UUUGGACGGA | |
| | GGA | | | CUU | | | GGG | |
| 140 | GGAGUUUGG | 143 | 1264-1284 | UAGACCCUCC | 326 | 1262-1284 | UCGGAGUUUG | 509 |
| | ACGGAGGGU | | | GUCCAAACUC | | | GACGGAGGGU | |
| | CUA | | | CGA | | | CUG | |
| 141 | CACCCCAGC | 144 | 1299-1319 | UACGGAAAGG | 327 | 1297-1319 | ACCACCCCAG | 510 |
| | GACCUUUCC | | | UCGCUGGGGU | | | CGACCUUUCC | |
| | GUA | | | GGU | | | GUG | |
| 142 | GUCUGUGAU | 145 | 1319-1339 | UGUCCGCUUG | 328 | 1317-1339 | GUGUCUGUGA | 511 |
| | CACAAGCGG | | | UGAUCACAGA | | | UCACAAGCGG | |
| | ACA | | | CAC | | | ACC | |
| 143 | UCUGUGAUC | 146 | 1320-1340 | UGGUCCGCUU | 329 | 1318-1340 | UGUCUGUGAU | 512 |
| | ACAAGCGGA | | | GUGAUCACAG | | | CACAAGCGGA | |
| | CCA | | | ACA | | | CCA | |
| 144 | CUGUGAUCA | 147 | 1321-1341 | UUGGUCCGCU | 330 | 1319-1341 | GUCUGUGAUC | 513 |
| | CAAGCGGAC | | | UGUGAUCACA | | | ACAAGCGGAC | |
| | CAA | | | GAC | | | CAU | |
| 145 | UGUGAUCAC | 148 | 1322-1342 | UAUGGUCCGC | 331 | 1320-1342 | UCUGUGAUCA | 514 |
| | AAGCGGACC | | | UUGUGAUCAC | | | CAAGCGGACC | |
| | AUA | | | AGA | | | AUC | |
| 146 | GUGAUCACA | 149 | 1323-1343 | UGAUGGUCCG | 332 | 1321-1343 | CUGUGAUCAC | 515 |
| | AGCGGACCA | | | CUUGUGAUCA | | | AAGCGGACCA | |
| | UCA | | | CAG | | | UCC | |
| 147 | AGGAGCUGC | 150 | 1371-1391 | UUGCUUUGGC | 333 | 1369-1391 | CCAGGAGCUG | 516 |
| | UAGCCAAAG | | | UAGCAGCUCC | | | CUAGCCAAAG | |
| | CAA | | | UGG | | | CAU | |
| 148 | AGCUGCUAG | 151 | 1374-1394 | UCAAUGCUUU | 334 | 1372-1394 | GGAGCUGCUA | 517 |
| | CCAAAGCAU | | | GGCUAGCAGC | | | GCCAAAGCAU | |
| | UGA | | | UCC | | | UGG | |
| 149 | CUGCUAGCC | 152 | 1376-1396 | UUCCAAUGCU | 335 | 1374-1396 | AGCUGCUAGC | 518 |
| | AAAGCAUUG | | | UUGGCUAGCA | | | CAAAGCAUUG | |
| | GAA | | | GCU | | | GAG | |
| 150 | UGCUAGCCA | 153 | 1377-1397 | UCUCCAAUGC | 336 | 1375-1397 | GCUGCUAGCC | 519 |
| | AAGCAUUGG | | | UUUGGCUAGC | | | AAAGCAUUGG | |
| | AGA | | | AGC | | | AGA | |
| 151 | CUAGCCAAA | 154 | 1379-1399 | UGUCUCCAAU | 337 | 1377-1399 | UGCUAGCCAA | 520 |
| | GCAUUGGAG | | | GCUUUGGCUA | | | AGCAUUGGAG | |
| | ACA | | | GCA | | | ACC | |
| 152 | UAGCCAAAG | 155 | 1380-1400 | UGGUCUCCAA | 338 | 1378-1400 | GCUAGCCAAA | 521 |
| | CAUUGGAGA | | | UGCUUUGGCU | | | GCAUUGGAGA | |
| | CCA | | | AGC | | | CCC | |
| 153 | GGAGCUCCU | 156 | 1729-1749 | UAGGUCCAAC | 339 | 1727-1749 | AGGGAGCUCC | 522 |
| | UCGUUGGAC | | | GAAGGAGCUC | | | UUCGUUGGAC | |
| | CUA | | | CCU | | | CUC | |
| 154 | GAGCUCCUU | 157 | 1730-1750 | UGAGGUCCAA | 340 | 1728-1750 | GGGAGCUCCU | 523 |
| | CGUUGGACC | | | CGAAGGAGCU | | | UCGUUGGACC | |
| | UCA | | | CCC | | | UCC | |
| 155 | AGCUCCUUC | 158 | 1731-1751 | UGGAGGUCCA | 341 | 1729-1751 | GGAGCUCCUU | 524 |
| | GUUGGACCU | | | ACGAAGGAGC | | | CGUUGGACCU | |
| | CCA | | | UCC | | | CCA | |
| 156 | AGGCCUGGG | 159 | 1762-1782 | UGCAACAUAU | 342 | 1760-1782 | CAAGGCCUGG | 525 |
| | CCAUAUGUU | | | GGCCCAGGCC | | | GCCAUAUGUU | |
| | GCA | | | UUG | | | GCU | |
| 157 | GCCUGGGCC | 160 | 1764-1784 | UCAGCAACAU | 343 | 1762-1784 | AGGCCUGGGC | 526 |
| | AUAUGUUGC | | | AUGGCCCAGG | | | CAUAUGUUGC | |
| | UGA | | | CCU | | | UGG | |
| 158 | CUGGGCCAU | 161 | 1766-1786 | UCCCAGCAAC | 344 | 1764-1786 | GCCUGGGCCA | 527 |
| | AUGUUGCUG | | | AUAUGGCCCA | | | UAUGUUGCUG | |
| | GGA | | | GGC | | | GGA | |
| 159 | UGGGCCAUA | 162 | 1767-1787 | UUCCCAGCAA | 345 | 1765-1787 | CCUGGGCCAU | 528 |
| | UGUUGCUGG | | | CAUAUGGCCC | | | AUGUUGCUGG | |
| | GAA | | | AGG | | | GAA | |
| 160 | AUGUUGCUG | 163 | 1775-1795 | UGAGGAAAUU | 346 | 1773-1795 | AUAUGUUGCU | 529 |
| | GGAAUUUCC | | | CCCAGCAACA | | | GGGAAUUUCC | |
| | UCA | | | UAU | | | UCC | |
| 161 | CUGGGAAUU | 164 | 1781-1801 | UAGGGUGGAG | 347 | 1779-1801 | UGCUGGGAAU | 530 |
| | UCCUCCACC | | | GAAAUUCCCA | | | UUCCUCCACC | |
| | CUA | | | GCA | | | CUU | |
| 162 | UUCCUCCAC | 165 | 1789-1809 | UCAUGACGAA | 348 | 1787-1809 | AUUUCCUCCA | 531 |
| | CCUUCGUCA | | | GGGUGGAGGA | | | CCCUUCGUCA | |
| | UGA | | | AAU | | | UGC | |
| 163 | AAGGGCCGC | 166 | 1838-1858 | UUAGGAAUGG | 349 | 1836-1858 | AGAAGGGCCG | 532 |
| | CUCCAUUCC | | | AGGCGGCCCU | | | CCUCCAUUCC | |
| | UAA | | | UCU | | | UAC | |
| 164 | GGCCGCCUC | 167 | 1841-1861 | UUAGUAGGAA | 350 | 1839-1861 | AGGGCCGCCU | 533 |
| | CAUUCCUAC | | | UGGAGGCGGC | | | CCAUUCCUAC | |
| | UAA | | | CCU | | | UAA | |
| 165 | ACUGCAAAG | 168 | 1904-1924 | UGCUGUCAUA | 351 | 1902-1924 | CCACUGCAAA | 534 |
| | ACUAUGACA | | | GUCUUUGCAG | | | GACUAUGACA | |
| | GCA | | | UGG | | | GCA | |
| 166 | CAGCAUCAA | 169 | 1920-1940 | UGGUCCUGAA | 352 | 1918-1940 | GACAGCAUCA | 535 |
| | AUUUCAGGA | | | AUUUGAUGCU | | | AAUUUCAGGA | |
| | CCA | | | GUC | | | CCU | |
| 167 | UCAGGACCU | 170 | 1932-1952 | UGUACUGUCU | 353 | 1930-1952 | UUUCAGGACC | 536 |
| | GCAGACAGU | | | GCAGGUCCUG | | | UGCAGACAGU | |
| | ACA | | | AAA | | | ACA | |
| 168 | GCAGACAGU | 171 | 1941-1961 | UAUCUAGCCU | 354 | 1939-1961 | CUGCAGACAG | 537 |
| | ACAGGCUAG | | | GUACUGUCUG | | | UACAGGCUAG | |
| | AUA | | | CAG | | | AUA | |
| 169 | CAGACAGUA | 172 | 1942-1962 | UUAUCUAGCC | 355 | 1940-1962 | UGCAGACAGU | 538 |
| | CAGGCUAGA | | | UGUACUGUCU | | | ACAGGCUAGA | |
| | UAA | | | GCA | | | UAA | |
| 170 | AGACAGUAC | 173 | 1943-1963 | UUUAUCUAGC | 356 | 1941-1963 | GCAGACAGUA | 539 |
| | AGGCUAGAU | | | CUGUACUGUC | | | CAGGCUAGAU | |
| | AAA | | | UGC | | | AAC | |
| 171 | UCCCACUUG | 174 | 2087-2107 | UGCCUUUCAG | 357 | 2085-2107 | CCUCCCACUU | 540 |
| | CCCUGAAAG | | | GGCAAGUGGG | | | GCCCUGAAAG | |
| | GCA | | | AGG | | | GCC | |
| 172 | CUGCUGCUA | 175 | 2148-2168 | UGGGAUUAGA | 358 | 2146-2168 | GACUGCUGCU | 541 |
| | CAUCUAAUC | | | UGUAGCAGCA | | | ACAUCUAAUC | |
| | CCA | | | GUC | | | CCC | |
| 173 | UGCUGCUAC | 176 | 2149-2169 | UGGGGAUUAG | 359 | 2147-2169 | ACUGCUGCUA | 542 |
| | AUCUAAUCC | | | AUGUAGCAGC | | | CAUCUAAUCC | |
| | CCA | | | AGU | | | CCU | |
| 174 | GCUGCUACA | 177 | 2150-2170 | UAGGGGAUUA | 360 | 2148-2170 | CUGCUGCUAC | 543 |
| | UCUAAUCCC | | | GAUGUAGCAG | | | AUCUAAUCCC | |
| | CUA | | | CAG | | | CUA | |
| 175 | ACAUCUAAU | 178 | 2156-2176 | UAUUGGUAGG | 361 | 2154-2176 | CUACAUCUAA | 544 |
| | CCCCUACCA | | | GGAUUAGAUG | | | UCCCCUACCA | |
| | AUA | | | UAG | | | AUG | |
| 176 | AUCUAAUCC | 179 | 2158-2178 | UGCAUUGGUA | 362 | 2156-2178 | ACAUCUAAUC | 545 |
| | CCUACCAAU | | | GGGGAUUAGA | | | CCCUACCAAU | |
| | GCA | | | UGU | | | GCC | |
| 177 | CCCCUACCA | 180 | 2165-2185 | UACAGGAGGC | 363 | 2163-2185 | AUCCCCUACC | 546 |
| | AUGCCUCCU | | | AUUGGUAGGG | | | AAUGCCUCCU | |
| | GUA | | | GAU | | | GUC | |
| 178 | CCCUACCAA | 181 | 2166-2186 | UGACAGGAGG | 364 | 2164-2186 | UCCCCUACCA | 547 |
| | UGCCUCCUG | | | CAUUGGUAGG | | | AUGCCUCCUG | |
| | UCA | | | GGA | | | UCC | |
| 179 | ACCAAUGCC | 182 | 2170-2190 | UUAGGGACAG | 365 | 2168-2190 | CUACCAAUGC | 548 |
| | UCCUGUCCC | | | GAGGCAUUGG | | | CUCCUGUCCC | |
| | UAA | | | UAG | | | UAA | |
| 180 | CCAAUGCCU | 183 | 2171-2191 | UUUAGGGACA | 366 | 2169-2191 | UACCAAUGCC | 549 |
| | CCUGUCCCU | | | GGAGGCAUUG | | | UCCUGUCCCU | |
| | AAA | | | GUA | | | AAA | |
| 181 | AUGCCUCCU | 184 | 2174-2194 | UAGUUUAGGG | 367 | 2172-2194 | CAAUGCCUCC | 550 |
| | GUCCCUAAA | | | ACAGGAGGCA | | | UGUCCCUAAA | |
| | CUA | | | UUG | | | CUC | |
| 182 | UGCCUCCUG | 185 | 2175-2195 | UGAGUUUAGG | 368 | 2173-2195 | AAUGCCUCCU | 551 |
| | UCCCUAAAC | | | GACAGGAGGC | | | GUCCCUAAAC | |
| | UCA | | | AUU | | | UCC | |
| 183 | UACUGAUGA | 186 | 2202-2222 | UAGAGAGGGC | 369 | 2200-2222 | CAUACUGAUG | 552 |
| | CAGCCCUCU | | | UGUCAUCAGU | | | ACAGCCCUCU | |
| | CUA | | | AUG | | | CUG | |
| 184 | AGCUCAGCA | 553 | 726-746 | UGAACGAGAC | 602 | 724-746 | CCAGCUCAGC | 1132 |
| | GUGUCUCGU | | | ACUGCUGAGC | | | AGUGUCUCGU | |
| | UCA | | | UGG | | | UCC | |
| 185 | GCUCAGCAG | 554 | 727-747 | UGGAACGAGA | 603 | 725-747 | CAGCUCAGCA | 1133 |
| | UGUCUCGUU | | | CACUGCUGAG | | | GUGUCUCGUU | |
| | CCA | | | CUG | | | CCC | |
| 186 | GGACGGUAG | 555 | 752-772 | UAUGUCGGUC | 604 | 750-772 | GGGGACGGUA | 1134 |
| | CAGACCGAC | | | UGCUACCGUC | | | GCAGACCGAC | |
| | AUA | | | CCC | | | AUC | |
| 187 | ACGGUAGCA | 556 | 754-774 | UGGAUGUCGG | 605 | 752-774 | GGACGGUAGC | 1135 |
| | GACCGACAU | | | UCUGCUACCG | | | AGACCGACAU | |
| | CCA | | | UCC | | | CCU | |
| 188 | CGGUAGCAG | 557 | 755-775 | UAGGAUGUCG | 606 | 753-775 | GACGGUAGCA | 1136 |
| | ACCGACAUC | | | GUCUGCUACC | | | GACCGACAUC | |
| | CUA | | | GUC | | | CUU | |
| 189 | AGCAGACCG | 558 | 759-779 | UCAGAAGGAU | 607 | 757-779 | GUAGCAGACC | 1137 |
| | ACAUCCUUC | | | GUCGGUCUGC | | | GACAUCCUUC | |
| | UGA | | | UAC | | | UGG | |
| 190 | GCAGACCGA | 559 | 760-780 | UCCAGAAGGA | 608 | 758-780 | UAGCAGACCG | 1138 |
| | CAUCCUUCU | | | UGUCGGUCUG | | | ACAUCCUUCU | |
| | GGA | | | CUA | | | GGG | |
| 191 | UCCAUGCAA | 560 | 894-914 | UGUGAUGGAC | 609 | 892-914 | CUUCCAUGCA | 1139 |
| | CUGUCCAUC | | | AGUUGCAUGG | | | ACUGUCCAUC | |
| | ACA | | | AAG | | | ACG | |
| 192 | CCAUGCAAC | 561 | 895-915 | UCGUGAUGGA | 610 | 893-915 | UUCCAUGCAA | 1140 |
| | UGUCCAUCA | | | CAGUUGCAUG | | | CUGUCCAUCA | |
| | CGA | | | GAA | | | CGG | |
| 193 | CAUGCAACU | 562 | 896-916 | UCCGUGAUGG | 611 | 894-916 | UCCAUGCAAC | 1141 |
| | GUCCAUCAC | | | ACAGUUGCAU | | | UGUCCAUCAC | |
| | GGA | | | GGA | | | GGC | |
| 194 | AACUGUCCA | 563 | 901-921 | UUGCAGCCGU | 612 | 989-921 | GCAACUGUCC | 1142 |
| | UCACGGCUG | | | GAUGGACAGU | | | AUCACGGCUG | |
| | CAA | | | UGC | | | CAA | |
| 195 | ACUGUCCAU | 564 | 902-922 | UUUGCAGCCG | 613 | 900-922 | CAACUGUCCA | 1143 |
| | CACGGCUGC | | | UGAUGGACAG | | | UCACGGCUGC | |
| | AAA | | | UUG | | | AAC | |
| 196 | GUCCAUCAC | 565 | 905-925 | UCAGUUGCAG | 614 | 903-925 | CUGUCCAUCA | 1144 |
| | GGCUGCAAC | | | CCGUGAUGGA | | | CGGCUGCAAC | |
| | UGA | | | CAG | | | UGA | |
| 197 | AUCACGGCU | 566 | 909-929 | UAUUUCAGUU | 615 | 907-929 | CCAUCACGGC | 1145 |
| | GCAACUGAA | | | GCAGCCGUGA | | | UGCAACUGAA | |
| | AUA | | | UGG | | | AUC | |
| 198 | UGGGACACA | 567 | 935-955 | UUUCUGGUGC | 616 | 933-955 | GCUGGGACAC | 1146 |
| | GCGCACCAG | | | GCUGUGUCCC | | | AGCGCACCAG | |
| | AAA | | | AGC | | | AAG | |
| 199 | GACACAGCG | 568 | 938-958 | UAGCUUCUGG | 617 | 936-958 | GGGACACAGC | 1147 |
| | CACCAGAAG | | | UGCGCUGUGU | | | GCACCAGAAG | |
| | CUA | | | CCC | | | CUA | |
| 200 | ACAGCGCAC | 569 | 941-961 | UUUUAGCUUC | 618 | 939-961 | ACACAGCGCA | 1148 |
| | CAGAAGCUA | | | UGGUGCGCUG | | | CCAGAAGCUA | |
| | AAA | | | UGU | | | AAG | |
| 201 | GCCACAUUC | 570 | 1659-1677 | UGAGCCCGUA | 619 | 1659-1679 | AAGCCACAUU | 1149 |
| | UACGGGCUC | | | GAAUGUGGCU | | | CUACGGGCUC | |
| | A | | | U | | | U | |
| 202 | GAAAGUACU | 571 | 1715-1733 | UAGCUCCCUG | 620 | 1715-1735 | AAGAAAGUAC | 1150 |
| | CAGGGAGCU | | | AGUACUUUCU | | | UCAGGGAGCU | |
| | A | | | U | | | C | |
| 203 | GUCUAUACC | 572 | 2033-2051 | UUCAGGUAAG | 621 | 2033-2053 | AAGUCUAUAC | 1151 |
| | CUUACCUGA | | | GGUAUAGACU | | | CCUUACCUGA | |
| | A | | | U | | | A | |
| 204 | GCUGCUAGC | 573 | 1373-1391 | UAAUGCUUUG | 622 | 1373-1393 | GAGCUGCUAG | 1152 |
| | CAAAGCAUU | | | GCUAGCAGCU | | | CCAAAGCAUU | |
| | A | | | C | | | G | |
| 205 | GGAGUGGAG | 574 | 1534-1552 | UAUGACAGCA | 623 | 1534-1554 | AAGGAGUGGA | 1153 |
| | UGCUGUCAU | | | CUCCACUCCU | | | GUGCUGUCAU | |
| | A | | | U | | | A | |
| 206 | GGCCAAGAU | 575 | 2102-2120 | UGACAUCUUG | 624 | 2102-2122 | AAGGCCAAGA | 1154 |
| | CAAGAUGUC | | | AUCUUGGCCU | | | UCAAGAUGUC | |
| | A | | | U | | | C | |
| 207 | CUUGAGAUC | 576 | 2228-2246 | UAUGAAGACA | 625 | 2228-2248 | ACCUUGAGAU | 1155 |
| | UGUCUUCAU | | | GAUCUCAAGU | | | CUGUCUUCAU | |
| | A | | | U | | | ACC | |
| 208 | CUUGAGAUC | 576 | 2228-2246 | UAUGAAGACA | 626 | 2228-2248 | UUACCUUGAG | 1156 |
| | UGUCUUCAU | | | GAUCUCAAGG | | | AUCUGUCUUC | |
| | A | | | U | | | AUA | |
| 209 | CCUCAAACU | 577 | 2254-2272 | UGUUUUUGUU | 627 | 2254-2274 | CCCCUCAAAC | 1157 |
| | AACAAAAAC | | | AGUUUGAGGG | | | UAACAAAAAC | |
| | A | | | G | | | A | |
| 210 | CUCAAACUA | 578 | 2255-2273 | UUGUUUUUGU | 628 | 2255-2275 | CCCUCAAACU | 1158 |
| | ACAAAAACA | | | UAGUUUGAGG | | | AACAAAAACA | |
| | A | | | G | | | U | |
| 211 | CAAACUAAC | 579 | 2257-2275 | UAAUGUUUUU | 629 | 2257-2277 | CUCAAACUAA | 1159 |
| | AAAAACAUU | | | GUUAGUUUGA | | | CAAAAACAUU | |
| | A | | | G | | | U | |
| 212 | CUAACAAAA | 580 | 2261-2279 | UUGGAAAUGU | 630 | 2261-2281 | AACUAACAAA | 1160 |
| | ACAUUUCCA | | | UUUUGUUAGU | | | AACAUUUCCA | |
| | A | | | U | | | A | |
| 213 | CAAAAACAU | 581 | 2265-2283 | UUUAUUGGAA | 631 | 2265-2285 | AACAAAAACA | 1161 |
| | UUCCAAUAA | | | AUGUUUUUGU | | | UUUCCAAUAA | |
| | A | | | U | | | A | |
| 214 | CCAAUAAAA | 582 | 2276-2294 | UAUUUGAUAU | 632 | 2276-2296 | UUCCAAUAAA | 1162 |
| | AUAUCAAAU | | | UUUUAUUGGA | | | AAUAUCAAAU | |
| | A | | | A | | | A | |
| 215 | CAAUAAAAA | 583 | 2277-2295 | UUAUUUGAUA | 633 | 2277-2297 | UCCAAUAAAA | 1163 |
| | UAUCAAAUA | | | UUUUUAUUGG | | | AUAUCAAAUA | |
| | A | | | A | | | U | |
| 216 | CCAAAGCAU | 584 | 1381-1399 | UGGGUCUCCA | 634 | 1381-1401 | AGCCAAAGCA | 1164 |
| | UGGAGACCC | | | AUGCUUUGGU | | | UUGGAGACCC | |
| | A | | | U | | | U | |
| 217 | CAGGUCAGU | 585 | 1238-1256 | UAUAUUAGAU | 635 | 1238-1258 | CUCAGGUCAG | 1165 |
| | AUCUAAUAU | | | ACUGACCUGU | | | UAUCUAAUAU | |
| | A | | | U | | | A | |
| 218 | AUGUCAAAG | 586 | 1651-1669 | UAGAAUGUGG | 636 | 1651-1671 | GAAUGUCAAA | 1166 |
| | CCACAUUCU | | | CUUUGACAUU | | | GCCACAUUCU | |
| | A | | | C | | | A | |
| 219 | GCUCUACUC | 587 | 1673-1691 | UCAACUCAUA | 637 | 1673-1693 | GGGCUCUACU | 1167 |
| | UAUGAGUUG | | | GAGUAGAGCU | | | CUAUGAGUUG | |
| | A | | | U | | | U | |
| 220 | CUAUGAGUU | 588 | 1681-1699 | UGAAAGUCAC | 638 | 1681-1701 | CUCUAUGAGU | 1168 |
| | GUGACUUUC | | | AACUCAUAGA | | | UGUGACUUUC | |
| | A | | | G | | | A | |
| 221 | UAUGAGUUG | 589 | 1682-1700 | UUGAAAGUCA | 639 | 1682-1702 | UCUAUGAGUU | 1169 |
| | UGACUUUCA | | | CAACUCAUAG | | | GUGACUUUCA | |
| | A | | | A | | | A | |
| 222 | GGCCCAAAG | 590 | 1707-1725 | UGAGUACUUU | 640 | 1707-1727 | UUGGCCCAAA | 1170 |
| | AAAGUACUC | | | CUUUGGGCCU | | | GAAAGUACUC | |
| | A | | | U | | | A | |
| 223 | GCCAUAUGU | 591 | 1768-1786 | UUUCCCAGCA | 641 | 1768-1788 | GGGCCAUAUG | 1171 |
| | UGCUGGGAA | | | ACAUAUGGCU | | | UUGCUGGGAA | |
| | A | | | U | | | U | |
| 224 | CCCACUGCA | 592 | 1899-1979 | UCAUAGUCUU | 642 | 1899-1981 | GACCCACUGC | 1172 |
| | AAGACUAUG | | | UGCAGUGGGU | | | AAAGACUAUG | |
| | A | | | U | | | A | |
| 225 | GACUAUGAC | 593 | 1910-1928 | UUUUGAUGCU | 643 | 1910-1930 | AAGACUAUGA | 1173 |
| | AGCAUCAAA | | | GUCAUAGUCU | | | CAGCAUCAAA | |
| | A | | | U | | | U | |
| 226 | CUAUGACAG | 594 | 1912-1930 | UAAUUUGAUG | 644 | 1912-1932 | GACUAUGACA | 1174 |
| | CAUCAAAUU | | | CUGUCAUAGU | | | GCAUCAAAUU | |
| | A | | | C | | | U | |
| 227 | CUGAAGAAU | 595 | 2047-2065 | UAAGAACAGC | 645 | 2047-2067 | ACCUGAAGAA | 1175 |
| | GCUGUUCUU | | | AUUCUUCAGU | | | UGCUGUUCUU | |
| | A | | | U | | | U | |
| 228 | CUGAAGAAU | 595 | 2047-2065 | UAAGAACAGC | 646 | 2047-2067 | ACCUGAAGAA | 1176 |
| | GCUGUUCUU | | | AUUCUUCAGG | | | UGCUGUUCUU | |
| | A | | | U | | | U | |
| 229 | CCUGAAAGG | 596 | 2095-2113 | UUGAUCUUGG | 647 | 2095-2115 | GCCCUGAAAG | 1177 |
| | CCAAGAUCA | | | CCUUUCAGGU | | | GCCAAGAUCA | |
| | A | | | U | | | A | |
| 230 | CCUGAAAGG | 596 | 2095-2113 | UUGAUCUUGG | 648 | 2095-2115 | GCCCUGAAAG | 1178 |
| | CCAAGAUCA | | | CCUUUCAGGG | | | GCCAAGAUCA | |
| | A | | | C | | | A | |
| 231 | GACUGCUGC | 597 | 2144-2162 | UUUAGAUGUA | 649 | 2144-2164 | CUGACUGCUG | 1179 |
| | UACAUCUAA | | | GCAGCAGUCU | | | CUACAUCUAA | |
| | A | | | U | | | U | |
| 232 | AGGUCAGUA | 598 | 1239-1257 | UUAUAUUAGA | 650 | 1239-1259 | UCAGGUCAGU | 1180 |
| | UCUAAUAUA | | | UACUGACCUU | | | AUCUAAUAUA | |
| | A | | | U | | | A | |
| 233 | GGAAUUUCC | 599 | 1782-1800 | UAAGGGUGGA | 651 | 1782-1802 | UGGGAAUUUC | 1181 |
| | UCCACCCUU | | | GGAAAUUCCU | | | CUCCACCCUU | |
| | A | | | U | | | C | |
| 234 | GAUUCACCU | 600 | 1597-1615 | UACACGUCAA | 652 | 1597-1617 | CCGAUUCACC | 1182 |
| | UUGACGUGU | | | AGGUGAAUCU | | | UUUGACGUGU | |
| | A | | | U | | | A | |
| 235 | GAGGAUGAC | 601 | 1479-1497 | UCAGGCACGU | 653 | 1479-1499 | UGGAGGAUGA | 1183 |
| | ACGUGCCUG | | | GUCAUCCUCU | | | CACGUGCCUG | |
| | A | | | U | | | A | |
| 236 | CUCUAUGAG | 602 | 1679-1697 | UAAGUCACAA | 654 | 1679-1699 | UACUCUAUGA | 1184 |
| | UUGUGACUU | | | CUCAUAGAGU | | | GUUGUGACUU | |
| | A | | | A | | | U | |
| 237 | AGAGGAGGA | 603 | 1430-1448 | UGCAGUUCCA | 655 | 1430-1450 | CUAGAGGAGG | 1185 |
| | UGGAACUGC | | | UCCUCCUCUA | | | AUGGAACUGC | |
| | A | | | G | | | A | |
| 238 | GAUUCACCU | 600 | 1597-1615 | UACACGUCAA | 656 | 1597-1617 | CCGAUUCACC | 1186 |
| | UUGACGUGU | | | AGGUGAAUCG | | | UUUGACGUGU | |
| | A | | | G | | | A | |
| 239 | UCAGGUCAG | 601 | 1237-1255 | UUAUUAGAUA | 657 | 1237-1257 | ACUCAGGUCA | 1187 |
| | UAUCUAAUA | | | CUGACCUGAU | | | GUAUCUAAUA | |
| | A | | | U | | | U | |

[0629] The nucleotide sequence of exemplary modified versions of the dsRNA agents set forth in Table 2 are set forth in Table 3. More specifically, Table 3 sets forth the nucleotide sequence of exemplary sense strands, antisense strands, and dsRNA agent pairs of sense and antisense strands. It is to be understood that while the sense and antisense strands are set forth in pairs in Table 3, the disclosure encompasses dsRNA agents comprising any sense strand and any antisense set forth in Table 3 (e.g., that are at least partially complementary (e.g., as could be determined by a person of ordinary skill in the art)). It is to be understood that while the nucleotide sequence of the sense strands and antisense strands in Table 3 are set forth as modified (i.e., contain at least one modified nucleotide), the disclosure encompasses the sense and antisense sense strands set forth in Table 3 comprising other nucleotide modifications (e.g., as described herein) or that are unmodified.

TABLE 3
Modified Sense and Antisense Strand
Sequences of CIDEB dsRNA Agents.

| dsRNA | Sense | SEQ | | Antisense | SEQ | | mRNA | SEQ |
|---|---|---|---|---|---|---|---|---|
| Agent | Sequence | ID | Range in | Sequence | ID | Range in | Target | ID |
| ID | 5′ to 3′ | NO | NM_014430.4 | 5′ to 3′ | NO | NM_014430.4 | Sequence | NO |
| 240 | asgsagcaA | 658 | 63-83 | (vinu)sGfs | 893 | 61-83 | CCAGAGCAAG | 370 |
| | fgCfCfGfa | | | cuuGfcCfUf | | | CCGAAGGCAA | |
| | aggcaagca | | | ucggCfuUfg | | | GCA | |
| | | | | cucusgsg | | | | |
| 241 | asasgccgA | 659 | 68-88 | (vinu)sAfs | 894 | 66-88 | GCAAGCCGAA | 371 |
| | faGfGfCfa | | | ucgUfgCfUf | | | GGCAAGCACG | |
| | agcacgaua | | | ugccUfuCfg | | | AUG | |
| | | | | gcuusgsc | | | | |
| 242 | asgsccgaA | 660 | 69-89 | (vinu)sCfs | 895 | 67-89 | CAAGCCGAAG | 372 |
| | fgGfCfAfa | | | aucGfuGfCf | | | GCAAGCACGA | |
| | gcacgauga | | | uugcCfuUfc | | | UGG | |
| | | | | ggcususg | | | | |
| 243 | cscsgaagG | 661 | 71-91 | (vinu)sGfs | 896 | 69-91 | AGCCGAAGGC | 373 |
| | fcAfAfGfc | | | ccaUfcGfUf | | | AAGCACGAUG | |
| | acgauggca | | | gcuuGfcCfu | | | GCG | |
| | | | | ucggscsu | | | | |
| 244 | csgsaaggC | 662 | 72-92 | (vinu)sCfs | 897 | 70-92 | GCCGAAGGCA | 374 |
| | faAfGfCfa | | | gccAfuCfGf | | | AGCACGAUGG | |
| | cgauggcga | | | ugcuUfgCfc | | | CGC | |
| | | | | uucgsgsc | | | | |
| 245 | gsgscaagC | 663 | 76-96 | (vinu)sUfs | 898 | 74-96 | AAGGCAAGCA | 375 |
| | faCfGfAfu | | | gagCfgCfCf | | | CGAUGGCGCU | |
| | ggcgcucaa | | | aucgUfgCfu | | | CAC | |
| | | | | ugccsusu | | | | |
| 246 | gscsaagcA | 664 | 77-97 | (vinu)sGfs | 899 | 75-97 | AGGCAAGCAC | 376 |
| | fcGfAfUfg | | | ugaGfcGfCf | | | GAUGGCGCUC | |
| | gcgcucaca | | | caucGfuGfc | | | ACC | |
| | | | | uugcscsu | | | | |
| 247 | csasagcaC | 665 | 78-98 | (vinu)sGfs | 900 | 76-98 | GGCAAGCACG | 377 |
| | fgAfUfGfg | | | gugAfgCfGf | | | AUGGCGCUCA | |
| | cgcucacca | | | ccauCfgUfg | | | CCA | |
| | | | | cuugscsc | | | | |
| 248 | asasgcacG | 666 | 79-99 | (vinu)sUfs | 901 | 77-99 | GCAAGCACGA | 378 |
| | faUfGfGfc | | | gguGfaGfCf | | | UGGCGCUCAC | |
| | gcucaccaa | | | gccaUfcGfu | | | CAG | |
| | | | | gcuusgsc | | | | |
| 249 | ascsgaugG | 667 | 83-103 | (vinu)sCfs | 902 | 81-103 | GCACGAUGGC | 379 |
| | fcGfCfUfc | | | ggcUfgGfUf | | | GCUCACCAGC | |
| | accagccga | | | gagcGfcCfa | | | CGG | |
| | | | | ucgusgsc | | | | |
| 250 | cscsccgcA | 668 | 143-163 | (vinu)sAfs | 903 | 141-163 | CGCCCCGCAG | 380 |
| | fgCfCfGfu | | | cgcUfgGfCf | | | CCGUGCCAGC | |
| | gccagcgua | | | acggCfuGfc | | | GUC | |
| | | | | ggggscsg | | | | |
| 251 | gscsagccG | 669 | 147-167 | (vinu)sCfs | 904 | 145-167 | CCGCAGCCGU | 381 |
| | fuGfCfCfa | | | gugAfcGfCf | | | GCCAGCGUCA | |
| | gcgucacga | | | uggcAfcGfg | | | CGC | |
| | | | | cugcsgsg | | | | |
| 252 | csasgccgU | 670 | 148-168 | (vinu)sGfs | 905 | 146-168 | CGCAGCCGUG | 382 |
| | fgCfCfAfg | | | cguGfaCfGf | | | CCAGCGUCAC | |
| | cgucacgca | | | cuggCfaCfg | | | GCU | |
| | | | | gcugscsg | | | | |
| 253 | asgsccguG | 671 | 149-169 | (vinu)sAfs | 906 | 147-169 | GCAGCCGUGC | 383 |
| | fcCfAfGfc | | | gcgUfgAfCf | | | CAGCGUCACG | |
| | gucacgcua | | | gcugGfcAfc | | | CUG | |
| | | | | ggcusgsc | | | | |
| 254 | gscscgugC | 672 | 150-170 | (vinu)sCfs | 907 | 148-170 | CAGCCGUGCC | 384 |
| | fcAfGfCfg | | | agcGfuGfAf | | | AGCGUCACGC | |
| | ucacgcuga | | | cgcuGfgCfa | | | UGU | |
| | | | | cggcsusg | | | | |
| 255 | csgsugccA | 673 | 152-172 | (vinu)sUfs | 908 | 150-172 | GCCGUGCCAG | 385 |
| | fgCfGfUfc | | | acaGfcGfUf | | | CGUCACGCUG | |
| | acgcuguaa | | | gacgCfuGfg | | | UAG | |
| | | | | cacgsgsc | | | | |
| 256 | gscscagcG | 674 | 155-175 | (vinu)sUfs | 909 | 153-175 | GUGCCAGCGU | 386 |
| | fuCfAfCfg | | | gcuAfcAfGf | | | CACGCUGUAG | |
| | cuguagcaa | | | cgugAfcGfc | | | CAG | |
| | | | | uggcsasc | | | | |
| 257 | cscsagcgU | 675 | 156-176 | (vinu)sCfs | 910 | 154-176 | UGCCAGCGUC | 387 |
| | fcAfCfGfc | | | ugcUfaCfAf | | | ACGCUGUAGC | |
| | uguagcaga | | | gcguGfaCfg | | | AGC | |
| | | | | cuggscsa | | | | |
| 258 | csasgcguC | 676 | 157-177 | (vinu)sGfs | 911 | 155-177 | GCCAGCGUCA | 388 |
| | faCfGfCfu | | | cugCfuAfCf | | | CGCUGUAGCA | |
| | guagcagca | | | agcgUfgAfc | | | GCC | |
| | | | | gcugsgsc | | | | |
| 259 | gscsgucaC | 677 | 159-179 | (vinu)sCfs | 912 | 157-179 | CAGCGUCACG | 389 |
| | fgCfUfGfu | | | ggcUfgCfUf | | | CUGUAGCAGC | |
| | agcagccga | | | acagCfgUfg | | | CGA | |
| | | | | acgcsusg | | | | |
| 260 | csgsucacG | 678 | 160-180 | (vinu)sUfs | 913 | 158-180 | AGCGUCACGC | 390 |
| | fcUfGfUfa | | | cggCfuGfCf | | | UGUAGCAGCC | |
| | gcagccgaa | | | uacaGfcGfu | | | GAG | |
| | | | | gacgscsu | | | | |
| 261 | gsuscacgC | 679 | 161-181 | (vinu)sCfs | 914 | 159-181 | GCGUCACGCU | 391 |
| | fuGfUfAfg | | | ucgGfcUfGf | | | GUAGCAGCCG | |
| | cagccgaga | | | cuacAfgCfg | | | AGC | |
| | | | | ugacsgsc | | | | |
| 262 | csascgcuG | 680 | 163-183 | (vinu)sUfs | 915 | 161-183 | GUCACGCUGU | 392 |
| | fuAfGfCfa | | | gcuCfgGfCf | | | AGCAGCCGAG | |
| | gccgagcaa | | | ugcuAfcAfg | | | CAU | |
| | | | | cgugsasc | | | | |
| 263 | ascsgcugU | 681 | 164-184 | (vinu)sAfs | 916 | 162-184 | UCACGCUGUA | 393 |
| | faGfCfAfg | | | ugcUfcGfGf | | | GCAGCCGAGC | |
| | ccgagcaua | | | cugcUfaCfa | | | AUC | |
| | | | | gcgusgsa | | | | |
| 264 | gscsuguaG | 682 | 166-186 | (vinu)sUfs | 917 | 164-186 | ACGCUGUAGC | 394 |
| | fcAfGfCfc | | | gauGfcUfCf | | | AGCCGAGCAU | |
| | gagcaucaa | | | ggcuGfcUfa | | | CAG | |
| | | | | cagcsgsu | | | | |
| 265 | asgsccgaG | 683 | 174-194 | (vinu)sUfs | 918 | 172-194 | GCAGCCGAGC | 395 |
| | fcAfUfCfa | | | uucGfgGfCf | | | AUCAGCCCGA | |
| | gcccgaaaa | | | ugauGfcUfc | | | AAG | |
| | | | | ggcusgsc | | | | |
| 266 | csgsagcaU | 684 | 177-197 | (vinu)sUfs | 919 | 175-197 | GCCGAGCAUC | 396 |
| | fcAfGfCfc | | | ccuUfuCfGf | | | AGCCCGAAAG | |
| | cgaaaggaa | | | ggcuGfaUfg | | | GAA | |
| | | | | cucgsgsc | | | | |
| 267 | csasgcccG | 685 | 184-204 | (vinu)sUfs | 920 | 182-204 | AUCAGCCCGA | 397 |
| | faAfAfGfg | | | cguGfcUfUf | | | AAGGAAGCAC | |
| | aagcacgaa | | | ccuuUfcGfg | | | GAA | |
| | | | | gcugsasu | | | | |
| 268 | asgscccgA | 686 | 185-205 | (vinu)sUfs | 921 | 183-205 | UCAGCCCGAA | 398 |
| | faAfGfGfa | | | ucgUfgCfUf | | | AGGAAGCACG | |
| | agcacgaaa | | | uccuUfuCfg | | | AAA | |
| | | | | ggcusgsa | | | | |
| 269 | gscsccgaA | 687 | 186-206 | (vinu)sUfs | 922 | 184-206 | CAGCCCGAAA | 399 |
| | faGfGfAfa | | | uucGfuGfCf | | | GGAAGCACGA | |
| | gcacgaaaa | | | uuccUfuUfc | | | AAG | |
| | | | | gggcsusg | | | | |
| 270 | csgsgcggC | 688 | 234-254 | (vinu)sGfs | 923 | 232-254 | GGCGGCGGCG | 400 |
| | fgUfGfGfa | | | ucgCfcGfGf | | | UGGACCGGCG | |
| | ccggcgaca | | | uccaCfgCfc | | | ACG | |
| | | | | gccgscsc | | | | |
| 271 | gsgscggcG | 689 | 235-255 | (vinu)sCfs | 924 | 233-255 | GCGGCGGCGU | 401 |
| | fuGfGfAfc | | | gucGfcCfGf | | | GGACCGGCGA | |
| | cggcgacga | | | guccAfcGfc | | | CGG | |
| | | | | cgccsgsc | | | | |
| 272 | gscsggcgU | 690 | 236-256 | (vinu)sCfs | 925 | 234-256 | CGGCGGCGUG | 402 |
| | fgGfAfCfc | | | cguCfgCfCf | | | GACCGGCGAC | |
| | ggcgacgga | | | ggucCfaCfg | | | GGG | |
| | | | | ccgcscsg | | | | |
| 273 | gsusggacc | 691 | 241-261 | (vinu)sGfs | 926 | 239-261 | GCGUGGACCG | 403 |
| | fgGfCfGfa | | | ccaCfcCfGf | | | GCGACGGGUG | |
| | cggguggca | | | ucgcCfgGfu | | | GCA | |
| | | | | ccacsgsc | | | | |
| 274 | usgsgaccG | 692 | 242-262 | (vinu)sUfs | 927 | 240-262 | CGUGGACCGG | 404 |
| | fgCfGfAfc | | | gccAfcCfCf | | | CGACGGGUGG | |
| | ggguggcaa | | | gucgCfcGfg | | | CAC | |
| | | | | uccascsg | | | | |
| 275 | gsgsaccgG | 693 | 243-263 | (vinu)sGfs | 928 | 241-263 | GUGGACCGGC | 405 |
| | fcGfAfCfg | | | ugcCfaCfCf | | | GACGGGUGGC | |
| | gguggcaca | | | cgucGfcCfg | | | ACA | |
| | | | | guccsasc | | | | |
| 276 | gsasccggC | 694 | 244-264 | (vinu)sUfs | 929 | 242-264 | UGGACCGGCG | 406 |
| | fgAfCfGfg | | | gugCfcAfCf | | | ACGGGUGGCA | |
| | guggcacaa | | | ccguCfgCfc | | | CAG | |
| | | | | ggucscsa | | | | |
| 277 | csgsgcgaC | 695 | 247-267 | (vinu)sAfs | 930 | 245-267 | ACCGGCGACG | 407 |
| | fgGfGfUfg | | | gcuGfuGfCf | | | GGUGGCACAG | |
| | gcacagcua | | | caccCfgUfc | | | CUG | |
| | | | | gccgsgsu | | | | |
| 278 | gscsgacgG | 696 | 249-269 | (vinu)sCfs | 931 | 247-269 | CGGCGACGGG | 408 |
| | fgUfGfGfc | | | cagCfuGfUf | | | UGGCACAGCU | |
| | acagcugga | | | gccaCfcCfg | | | GGC | |
| | | | | ucgcscsg | | | | |
| 279 | gsgsuggcA | 697 | 255-275 | (vinu)sCfs | 932 | 253-275 | CGGGUGGCAC | 409 |
| | fcAfGfCfu | | | guaUfgCfCf | | | AGCUGGCAUA | |
| | ggcauacga | | | agcuGfuGfc | | | CGC | |
| | | | | caccscsg | | | | |
| 280 | gsusggcaC | 698 | 256-276 | (vinu)sGfs | 933 | 254-276 | GGGUGGCACA | 410 |
| | faGfCfUfg | | | cguAfuGfCf | | | GCUGGCAUAC | |
| | gcauacgca | | | cagcUfgUfg | | | GCG | |
| | | | | ccacscsc | | | | |
| 281 | usgsgcacA | 699 | 257-277 | (vinu)sCfs | 934 | 255-277 | GGUGGCACAG | 411 |
| | fgCfUfGfg | | | gcgUfaUfGf | | | CUGGCAUACG | |
| | cauacgcga | | | ccagCfuGfu | | | CGG | |
| | | | | gccascsc | | | | |
| 282 | cscsuccaC | 700 | 280-300 | (vinu)sUfs | 935 | 278-300 | UCCCUCCACA | 412 |
| | faGfGfUfg | | | cuaCfcGfCf | | | GGUGGCGGUA | |
| | gcgguagaa | | | caccUfgUfg | | | GAC | |
| | | | | gaggsgsa | | | | |
| 283 | uscscacaG | 701 | 282-302 | (vinu)sCfs | 936 | 280-302 | CCUCCACAGG | 413 |
| | fgUfGfGfc | | | gucUfaCfCf | | | UGGCGGUAGA | |
| | gguagacga | | | gccaCfcUfg | | | CGG | |
| | | | | uggasgsg | | | | |
| 284 | csascaggU | 702 | 284-304 | (vinu)sGfs | 937 | 282-304 | UCCACAGGUG | 414 |
| | fgGfCfGfg | | | ccgUfcUfAf | | | GCGGUAGACG | |
| | uagacggca | | | ccgcCfaCfc | | | GCG | |
| | | | | ugugsgsa | | | | |
| 285 | gsusggcgG | 703 | 289-309 | (vinu)sCfs | 938 | 287-309 | AGGUGGCGGU | 415 |
| | fuAfGfAfc | | | ggcCfgCfCf | | | AGACGGCGGC | |
| | ggcggccga | | | gucuAfcCfg | | | CGG | |
| | | | | ccacscsu | | | | |
| 286 | csgsgccgG | 704 | 303-323 | (vinu)sGfs | 939 | 301-323 | GGCGGCCGGG | 416 |
| | fgAfCfGfg | | | uugCfuCfGf | | | ACGGCGAGCA | |
| | cgagcaaca | | | ccguCfcCfg | | | ACA | |
| | | | | gccgscsc | | | | |
| 287 | gsgsccggG | 705 | 304-324 | (vinu)sUfs | 940 | 302-324 | GCGGCCGGGA | 417 |
| | faCfGfGfc | | | guuGfcUfCf | | | CGGCGAGCAA | |
| | gagcaacaa | | | gccgUfcCfc | | | CAG | |
| | | | | ggccsgsc | | | | |
| 288 | csusggcgU | 706 | 449-469 | (vinu)sGfs | 941 | 447-469 | CGCUGGCGUA | 418 |
| | faCfAfUfg | | | cgcUfcAfGf | | | CAUGCUGAGC | |
| | cugagcgca | | | caugUfaCfg | | | GCG | |
| | | | | ccagscsg | | | | |
| 289 | usgsgcguA | 707 | 450-470 | (vinu)sCfs | 942 | 448-470 | GCUGGCGUAC | 419 |
| | fcAfUfGfc | | | gcgCfuCfAf | | | AUGCUGAGCG | |
| | ugagcgcga | | | gcauGfuAfc | | | CGC | |
| | | | | gccasgsc | | | | |
| 290 | gsgscguaC | 708 | 451-471 | (vinu)sGfs | 943 | 449-471 | CUGGCGUACA | 420 |
| | faUfGfCfu | | | cgcGfcUfCf | | | UGCUGAGCGC | |
| | gagcgcgca | | | agcaUfgUfa | | | GCA | |
| | | | | cgccsasg | | | | |
| 291 | gscsguacA | 709 | 452-472 | (vinu)sUfs | 944 | 450-472 | UGGCGUACAU | 421 |
| | fuGfCfUfg | | | gcgCfgCfUf | | | GCUGAGCGCG | |
| | agcgcgcaa | | | cagcAfuGfu | | | CAC | |
| | | | | acgcscsa | | | | |
| 292 | gscsugagC | 710 | 460-480 | (vinu)sAfs | 945 | 458-480 | AUGCUGAGCG | 422 |
| | fgCfGfCfa | | | cuaCfgUfGf | | | CGCACACGUA | |
| | cacguagua | | | ugcgCfgCfu | | | GUA | |
| | | | | cagcsasu | | | | |
| 293 | csusgagcG | 711 | 461-481 | (vinu)sUfs | 946 | 459-481 | UGCUGAGCGC | 423 |
| | fcGfCfAfc | | | acuAfcGfUf | | | GCACACGUAG | |
| | acguaguaa | | | gugcGfcGfc | | | UAC | |
| | | | | ucagscsa | | | | |
| 294 | gsasgcgcG | 712 | 463-483 | (vinu)sUfs | 947 | 461-483 | CUGAGCGCGC | 424 |
| | fcAfCfAfc | | | guaCfuAfCf | | | ACACGUAGUA | |
| | guaguacaa | | | guguGfcGfc | | | CAC | |
| | | | | gcucsasg | | | | |
| 295 | csgscgcaC | 713 | 466-486 | (vinu)sCfs | 948 | 464-486 | AGCGCGCACA | 425 |
| | faCfGfUfa | | | gguGfuAfCf | | | CGUAGUACAC | |
| | guacaccga | | | uacgUfgUfg | | | CGC | |
| | | | | cgcgscsu | | | | |
| 296 | gscsgcacA | 714 | 467-487 | (vinu)sGfs | 949 | 465-487 | GCGCGCACAC | 426 |
| | fcGfUfAfg | | | cggUfgUfAf | | | GUAGUACACC | |
| | uacaccgca | | | cuacGfuGfu | | | GCC | |
| | | | | gcgcsgsc | | | | |
| 297 | csgscacaC | 715 | 468-488 | (vinu)sGfs | 950 | 466-488 | CGCGCACACG | 427 |
| | fgUfAfGfu | | | gcgGfuGfUf | | | UAGUACACCG | |
| | acaccgcca | | | acuaCfgUfg | | | CCU | |
| | | | | ugcgscsg | | | | |
| 298 | gscsacacG | 716 | 469-489 | (vinu)sAfs | 951 | 467-489 | GCGCACACGU | 428 |
| | fuAfGfUfa | | | ggcGfgUfGf | | | AGUACACCGC | |
| | caccgccua | | | uacuAfcGfu | | | CUU | |
| | | | | gugcsgsc | | | | |
| 299 | csascacgU | 717 | 470-490 | (vinu)sAfs | 952 | 468-490 | CGCACACGUA | 429 |
| | faGfUfAfc | | | aggCfgGfUf | | | GUACACCGCC | |
| | accgccuua | | | guacUfaCfg | | | UUG | |
| | | | | ugugscsg | | | | |
| 300 | ascsacguA | 718 | 471-491 | (vinu)sCfs | 953 | 469-491 | GCACACGUAG | 430 |
| | fgUfAfCfa | | | aagGfcGfGf | | | UACACCGCCU | |
| | ccgccuuga | | | uguaCfuAfc | | | UGC | |
| | | | | gugusgsc | | | | |
| 301 | ascsguagU | 719 | 473-493 | (vinu)sUfs | 954 | 471-493 | ACACGUAGUA | 431 |
| | faCfAfCfc | | | gcaAfgGfCf | | | CACCGCCUUG | |
| | gccuugcaa | | | ggugUfaCfu | | | CAG | |
| | | | | acgusgsu | | | | |
| 302 | csgsuaguA | 720 | 474-494 | (vinu)sCfs | 955 | 472-494 | CACGUAGUAC | 432 |
| | fcAfCfCfg | | | ugcAfaGfGf | | | ACCGCCUUGC | |
| | ccuugcaga | | | cgguGfuAfc | | | AGC | |
| | | | | uacgsusg | | | | |
| 303 | gsusaguaC | 721 | 475-495 | (vinu)sGfs | 956 | 473-495 | ACGUAGUACA | 433 |
| | faCfCfGfc | | | cugCfaAfGf | | | CCGCCUUGCA | |
| | cuugcagca | | | gcggUfgUfa | | | GCC | |
| | | | | cuacsgsu | | | | |
| 304 | gscscugcC | 722 | 515-535 | (vinu)sGfs | 957 | 513-535 | AGGCCUGCCG | 434 |
| | fgGfGfUfc | | | ccuUfcCfUf | | | GGUCAGGAAG | |
| | aggaaggca | | | gaccCfgGfc | | | GCC | |
| | | | | aggcscsu | | | | |
| 305 | csasggaaG | 723 | 526-546 | (vinu)sCfs | 958 | 524-546 | GUCAGGAAGG | 435 |
| | fgCfCfAfc | | | gcuCfuUfUf | | | CCACAAAGAG | |
| | aaagagcga | | | guggCfcUfu | | | CGG | |
| | | | | ccugsasc | | | | |
| 306 | gsgsaaggC | 724 | 528-548 | (vinu)sGfs | 959 | 526-548 | CAGGAAGGCC | 436 |
| | fcAfCfAfa | | | ccgCfuCfUf | | | ACAAAGAGCG | |
| | agagcggca | | | uuguGfgCfc | | | GCG | |
| | | | | uuccsusg | | | | |
| 307 | gsasaggcC | 725 | 529-549 | (vinu)sCfs | 960 | 527-549 | AGGAAGGCCA | 437 |
| | faCfAfAfa | | | gccGfcUfCf | | | CAAAGAGCGG | |
| | gagcggcga | | | uuugUfgGfc | | | CGU | |
| | | | | cuucscsu | | | | |
| 308 | asasggccA | 726 | 530-550 | (vinu)sAfs | 961 | 528-550 | GGAAGGCCAC | 438 |
| | fcAfAfAfg | | | cgcCfgCfUf | | | AAAGAGCGGC | |
| | agcggcgua | | | cuuuGfuGfg | | | GUG | |
| | | | | ccuuscsc | | | | |
| 309 | asgsgccaC | 727 | 531-551 | (vinu)sCfs | 962 | 529-551 | GAAGGCCACA | 439 |
| | faAfAfGfa | | | acgCfcGfCf | | | AAGAGCGGCG | |
| | gcggcguga | | | ucuuUfgUfg | | | UGA | |
| | | | | gccususc | | | | |
| 310 | gsgsccacA | 728 | 532-552 | (vinu)sUfs | 963 | 530-552 | AAGGCCACAA | 440 |
| | faAfGfAfg | | | cacGfcCfGf | | | AGAGCGGCGU | |
| | cggcgugaa | | | cucuUfuGfu | | | GAG | |
| | | | | ggccsusu | | | | |
| 311 | cscsacaaA | 729 | 534-554 | (vinu)sGfs | 964 | 532-554 | GGCCACAAAG | 441 |
| | fgAfGfCfg | | | cucAfcGfCf | | | AGCGGCGUGA | |
| | gcgugagca | | | cgcuCfuUfu | | | GCA | |
| | | | | guggscsc | | | | |
| 312 | csascaaaG | 730 | 535-555 | (vinu)sUfs | 965 | 533-555 | GCCACAAAGA | 442 |
| | faGfCfGfg | | | gcuCfaCfGf | | | GCGGCGUGAG | |
| | cgugagcaa | | | ccgcUfcUfu | | | CAG | |
| | | | | ugugsgsc | | | | |
| 313 | asgscaccG | 731 | 557-577 | (vinu)sCfs | 966 | 555-577 | GCAGCACCGC | 443 |
| | fcGfCfCfg | | | uggCfcGfAf | | | GCCGUCGGCC | |
| | ucggccaga | | | cggcGfcGfg | | | AGC | |
| | | | | ugcusgsc | | | | |
| 314 | csgscgccG | 732 | 562-582 | (vinu)sUfs | 967 | 560-582 | ACCGCGCCGU | 444 |
| | fuCfGfGfc | | | ggcGfcUfGf | | | CGGCCAGCGC | |
| | cagcgccaa | | | gccgAfcGfg | | | CAG | |
| | | | | cgcgsgsu | | | | |
| 315 | gscsgccgU | 733 | 563-583 | (vinu)sCfs | 968 | 561-583 | CCGCGCCGUC | 445 |
| | fcGfGfCfc | | | uggCfgCfUf | | | GGCCAGCGCC | |
| | agcgccaga | | | ggccGfaCfg | | | AGG | |
| | | | | gcgcsgsg | | | | |
| 316 | csasgcacA | 734 | 586-606 | (vinu)sUfs | 969 | 584-606 | UGCAGCACAA | 446 |
| | faGfCfGfu | | | ggcGfgCfCf | | | GCGUGGCCGC | |
| | ggccgccaa | | | acgcUfuGfu | | | CAG | |
| | | | | gcugscsa | | | | |
| 317 | asgscacaA | 735 | 587-607 | (vinu)sCfs | 970 | 585-607 | GCAGCACAAG | 447 |
| | fgCfGfUfg | | | uggCfgGfCf | | | CGUGGCCGCC | |
| | gccgccaga | | | cacgCfuUfg | | | AGC | |
| | | | | ugcusgsc | | | | |
| 318 | gscsacaaG | 736 | 588-608 | (vinu)sGfs | 971 | 586-608 | CAGCACAAGC | 448 |
| | fcGfUfGfg | | | cugGfcGfGf | | | GUGGCCGCCA | |
| | ccgccagca | | | ccacGfcUfu | | | GCG | |
| | | | | gugcsusg | | | | |
| 319 | csasagcgU | 737 | 591-611 | (vinu)sAfs | 972 | 589-611 | CACAAGCGUG | 449 |
| | fgGfCfCfg | | | ccgCfuGfGf | | | GCCGCCAGCG | |
| | ccagcggua | | | cggcCfaCfg | | | GUC | |
| | | | | cuugsusg | | | | |
| 320 | asasgcguG | 738 | 592-612 | (vinu)sGfs | 973 | 590-612 | ACAAGCGUGG | 450 |
| | fgCfCfGfc | | | accGfcUfGf | | | CCGCCAGCGG | |
| | cagcgguca | | | gcggCfcAfc | | | UCG | |
| | | | | gcuusgsu | | | | |
| 321 | asgscgugG | 739 | 593-613 | (vinu)sCfs | 974 | 591-613 | CAAGCGUGGC | 451 |
| | fcCfGfCfc | | | gacCfgCfUf | | | CGCCAGCGGU | |
| | agcggucga | | | ggcgGfcCfa | | | CGC | |
| | | | | cgcususg | | | | |
| 322 | gscsguggC | 740 | 594-614 | (vinu)sGfs | 975 | 592-614 | AAGCGUGGCC | 452 |
| | fcGfCfCfa | | | cgaCfcGfCf | | | GCCAGCGGUC | |
| | gcggucgca | | | uggcGfgCfc | | | GCC | |
| | | | | acgcsusu | | | | |
| 323 | gsgscuguG | 741 | 697-717 | (vinu)sCfs | 976 | 695-717 | AAGGCUGUGC | 453 |
| | fcCfUfGfu | | | gcgGfgCfCf | | | CUGUGGCCCG | |
| | ggcccgcga | | | acagGfcAfc | | | CGA | |
| | | | | agccsusu | | | | |
| 324 | gscscuguG | 742 | 703-723 | (vinu)sAfs | 977 | 701-723 | GUGCCUGUGG | 454 |
| | fgCfCfCfg | | | gacUfuCfGf | | | CCCGCGAAGU | |
| | cgaagucua | | | cgggCfcAfc | | | CUU | |
| | | | | aggcsasc | | | | |
| 325 | csusguggC | 743 | 705-725 | (vinu)sGfs | 978 | 703-725 | GCCUGUGGCC | 455 |
| | fcCfGfCfg | | | aagAfcUfUf | | | CGCGAAGUCU | |
| | aagucuuca | | | cgcgGfgCfc | | | UCC | |
| | | | | acagsgsc | | | | |
| 326 | gscsccgcG | 744 | 710-730 | (vinu)sAfs | 979 | 708-730 | UGGCCCGCGA | 456 |
| | faAfGfUfc | | | gcuGfgAfAf | | | AGUCUUCCAG | |
| | uuccagcua | | | gacuUfcGfc | | | CUC | |
| | | | | gggcscsa | | | | |
| 327 | cscscgcgA | 745 | 711-731 | (vinu)sGfs | 980 | 709-731 | GGCCCGCGAA | 457 |
| | faGfUfCfu | | | agcUfgGfAf | | | GUCUUCCAGC | |
| | uccagcuca | | | agacUfuCfg | | | UCA | |
| | | | | cgggscsc | | | | |
| 328 | cscsgcgaA | 746 | 712-732 | (vinu)sUfs | 981 | 710-732 | GCCCGCGAAG | 458 |
| | fgUfCfUfu | | | gagCfuGfGf | | | UCUUCCAGCU | |
| | ccagcucaa | | | aagaCfuUfc | | | CAG | |
| | | | | gcggsgsc | | | | |
| 329 | uscscagcU | 747 | 723-743 | (vinu)sCfs | 982 | 721-743 | CUUCCAGCUC | 459 |
| | fcAfGfCfa | | | gagAfcAfCf | | | AGCAGUGUCU | |
| | gugucucga | | | ugcuGfaGfc | | | CGU | |
| | | | | uggasasg | | | | |
| 330 | csasgcucA | 748 | 725-745 | (vinu)sAfs | 983 | 723-745 | UCCAGCUCAG | 460 |
| | fgCfAfGfu | | | acgAfgAfCf | | | CAGUGUCUCG | |
| | gucucguua | | | acugCfuGfa | | | UUC | |
| | | | | gcugsgsa | | | | |
| 331 | gscsgcacC | 749 | 944-964 | (vinu)sGfs | 984 | 942-964 | CAGCGCACCA | 461 |
| | faGfAfAfg | | | acuUfuAfGf | | | GAAGCUAAAG | |
| | cuaaaguca | | | cuucUfgGfu | | | UCU | |
| | | | | gcgcsusg | | | | |
| 332 | csasgaagC | 750 | 950-970 | (vinu)sCfs | 985 | 948-970 | ACCAGAAGCU | 462 |
| | fuAfAfAfg | | | aucAfaGfAf | | | AAAGUCUUGA | |
| | ucuugauga | | | cuuuAfgCfu | | | UGC | |
| | | | | ucugsgsu | | | | |
| 333 | asgsaagcU | 751 | 951-971 | (vinu)sGfs | 986 | 949-971 | CCAGAAGCUA | 463 |
| | faAfAfGfu | | | cauCfaAfGf | | | AAGUCUUGAU | |
| | cuugaugca | | | acuuUfaGfc | | | GCC | |
| | | | | uucusgsg | | | | |
| 334 | gsasagcuA | 752 | 952-972 | (vinu)sGfs | 987 | 950-972 | CAGAAGCUAA | 464 |
| | faAfGfUfc | | | gcaUfcAfAf | | | AGUCUUGAUG | |
| | uugaugcca | | | gacuUfuAfg | | | CCA | |
| | | | | cuucsusg | | | | |
| 335 | asasgcuaA | 753 | 953-973 | (vinu)sUfs | 988 | 951-973 | AGAAGCUAAA | 465 |
| | faGfUfCfu | | | ggcAfuCfAf | | | GUCUUGAUGC | |
| | ugaugccaa | | | agacUfuUfa | | | CAU | |
| | | | | gcuuscsu | | | | |
| 336 | gscsuaaaG | 754 | 955-975 | (vinu)sGfs | 989 | 953-975 | AAGCUAAAGU | 466 |
| | fuCfUfUfg | | | augGfcAfUf | | | CUUGAUGCCA | |
| | augccauca | | | caagAfcUfu | | | UCA | |
| | | | | uagcsusu | | | | |
| 337 | gsasugccA | 755 | 966-986 | (vinu)sGfs | 990 | 964-986 | UUGAUGCCAU | 467 |
| | fuCfAfAfa | | | gauGfuCfCf | | | CAAAGGACAU | |
| | ggacaucca | | | uuugAfuGfg | | | CCC | |
| | | | | caucsasa | | | | |
| 338 | asusgccaU | 756 | 967-987 | (vinu)sGfs | 991 | 965-987 | UGAUGCCAUC | 468 |
| | fcAfAfAfg | | | ggaUfgUfCf | | | AAAGGACAUC | |
| | gacauccca | | | cuuuGfaUfg | | | CCU | |
| | | | | gcauscsa | | | | |
| 339 | gscscaucA | 757 | 969-989 | (vinu)sCfs | 992 | 967-989 | AUGCCAUCAA | 469 |
| | faAfGfGfa | | | aggGfaUfGf | | | AGGACAUCCC | |
| | caucccuga | | | uccuUfuGfa | | | UGC | |
| | | | | uggcsasu | | | | |
| 340 | csasucucU | 758 | 998-1018 | (vinu)sUfs | 993 | 996-1018 | CACAUCUCUG | 470 |
| | fgUfCfAfc | | | aguGfgAfCf | | | UCACGUCCAC | |
| | guccacuaa | | | gugaCfaGfa | | | UAA | |
| | | | | gaugsusg | | | | |
| 341 | asuscucuG | 759 | 999-1019 | (vinu)sUfs | 994 | 997-1019 | ACAUCUCUGU | 471 |
| | fuCfAfCfg | | | uagUfgGfAf | | | CACGUCCACU | |
| | uccacuaaa | | | cgugAfcAfg | | | AAU | |
| | | | | agausgsu | | | | |
| 342 | uscsucugU | 760 | 1000- | (vinu)sAfs | 995 | 998-1020 | CAUCUCUGUC | 472 |
| | fcAfCfGfu | | 1020 | uuaGfuGfGf | | | ACGUCCACUA | |
| | ccacuaaua | | | acguGfaCfa | | | AUC | |
| | | | | gagasusg | | | | |
| 343 | csuscuguC | 761 | 1001-1021 | (vinu)sGfs | 996 | 999-1021 | AUCUCUGUCA | 473 |
| | faCfGfUfc | | | auuAfgUfGf | | | CGUCCACUAA | |
| | cacuaauca | | | gacgUfgAfc | | | UCG | |
| | | | | agagsasu | | | | |
| 344 | uscsugucA | 762 | 1002-1022 | (vinu)sCfs | 997 | 1000-1022 | UCUCUGUCAC | 474 |
| | fcGfUfCfc | | | gauUfaGfUf | | | GUCCACUAAU | |
| | acuaaucga | | | ggacGfuGfa | | | CGG | |
| | | | | cagasgsa | | | | |
| 345 | csusgucaC | 763 | 1003-1023 | (vinu)sCfs | 998 | 1001-1023 | CUCUGUCACG | 475 |
| | fgUfCfCfa | | | cgaUfuAfGf | | | UCCACUAAUC | |
| | cuaaucgga | | | uggaCfgUfg | | | GGC | |
| | | | | acagsasg | | | | |
| 346 | usgsucacG | 764 | 1004-1024 | (vinu)sGfs | 999 | 1002-1024 | UCUGUCACGU | 476 |
| | fuCfCfAfc | | | ccgAfuUfAf | | | CCACUAAUCG | |
| | uaaucggca | | | guggAfcGfu | | | GCA | |
| | | | | gacasgsa | | | | |
| 347 | gsuscacgU | 765 | 1005-1025 | (vinu)sUfs | 1000 | 1003-1025 | CUGUCACGUC | 477 |
| | fcCfAfCfu | | | gccGfaUfUf | | | CACUAAUCGG | |
| | aaucggcaa | | | agugGfaCfg | | | CAA | |
| | | | | ugacsasg | | | | |
| 348 | uscsacguC | 766 | 1006-1026 | (vinu)sUfs | 1001 | 1004-1026 | UGUCACGUCC | 478 |
| | fcAfCfUfa | | | ugcCfgAfUf | | | ACUAAUCGGC | |
| | aucggcaaa | | | uaguGfgAfc | | | AAA | |
| | | | | gugascsa | | | | |
| 349 | csascgucc | 767 | 1007-1027 | (vinu)sUfs | 1002 | 1005-1027 | GUCACGUCCA | 479 |
| | faCfUfAfa | | | uugCfcGfAf | | | CUAAUCGGCA | |
| | ucggcaaaa | | | uuagUfgGfa | | | AAA | |
| | | | | cgugsasc | | | | |
| 350 | csgsuccaC | 768 | 1009-1029 | (vinu)sCfs | 1003 | 1007-1029 | CACGUCCACU | 480 |
| | fuAfAfUfc | | | uuuUfgCfCf | | | AAUCGGCAAA | |
| | ggcaaaaga | | | gauuAfgUfg | | | AGG | |
| | | | | gacgsusg | | | | |
| 351 | gsusccacU | 769 | 1010-1030 | (vinu)sCfs | 1004 | 1008-1030 | ACGUCCACUA | 481 |
| | faAfUfCfg | | | cuuUfuGfCf | | | AUCGGCAAAA | |
| | gcaaaagga | | | cgauUfaGfu | | | GGA | |
| | | | | ggacsgsu | | | | |
| 352 | uscscacuA | 770 | 1011-1031 | (vinu)sUfs | 1005 | 1009-1031 | CGUCCACUAA | 482 |
| | faUfCfGfg | | | ccuUfuUfGf | | | UCGGCAAAAG | |
| | caaaaggaa | | | ccgaUfuAfg | | | GAG | |
| | | | | uggascsg | | | | |
| 353 | cscsacuaA | 771 | 1012-1032 | (vinu)sCfs | 1006 | 1010-1032 | GUCCACUAAU | 483 |
| | fuCfGfGfc | | | uccUfuUfUf | | | CGGCAAAAGG | |
| | aaaaggaga | | | gccgAfuUfa | | | AGA | |
| | | | | guggsasc | | | | |
| 354 | csascuaaU | 772 | 1013-1033 | (vinu)sUfs | 1007 | 1011-1033 | UCCACUAAUC | 484 |
| | fcGfGfCfa | | | cucCfuUfUf | | | GGCAAAAGGA | |
| | aaaggagaa | | | ugccGfaUfu | | | GAA | |
| | | | | agugsgsa | | | | |
| 355 | ascsuaauC | 773 | 1014-1034 | (vinu)sUfs | 1008 | 1012-1034 | CCACUAAUCG | 485 |
| | fgGfCfAfa | | | ucuCfcUfUf | | | GCAAAAGGAG | |
| | aaggagaaa | | | uugcCfgAfu | | | AAA | |
| | | | | uagusgsg | | | | |
| 356 | gsasgaagA | 774 | 1040-1060 | (vinu)sCfs | 1009 | 1038-1060 | GAGAGAAGAU | 486 |
| | fuGfAfCfc | | | acaCfuUfAf | | | GACCUAAGUG | |
| | uaaguguga | | | ggucAfuCfu | | | UGA | |
| | | | | ucucsusc | | | | |
| 357 | uscscuccG | 775 | 1110-1130 | (vinu)sCfs | 1010 | 1108-1130 | CCUCCUCCGA | 487 |
| | faCfCfAfa | | | uucCfuCfCf | | | CCAAGGAGGA | |
| | ggaggaaga | | | uuggUfcGfg | | | AGG | |
| | | | | aggasgsg | | | | |
| 358 | cscsagggA | 776 | 1176-1196 | (vinu)sCfs | 1011 | 1174-1196 | UUCCAGGGAA | 488 |
| | faGfGfAfa | | | cggAfgAfGf | | | GGAACUCUCC | |
| | cucuccgga | | | uuccUfuCfc | | | GGU | |
| | | | | cuggsasa | | | | |
| 359 | csasgggaA | 777 | 1177-1197 | (vinu)sAfs | 1012 | 1175-1197 | UCCAGGGAAG | 489 |
| | fgGfAfAfc | | | ccgGfaGfAf | | | GAACUCUCCG | |
| | ucuccggua | | | guucCfuUfc | | | GUC | |
| | | | | ccugsgsa | | | | |
| 360 | asgsgaacU | 778 | 1183-1203 | (vinu)sUfs | 1013 | 1181-1203 | GAAGGAACUC | 490 |
| | fcUfCfCfg | | | gguGfgAfCf | | | UCCGGUCCAC | |
| | guccaccaa | | | cggaGfaGfu | | | CAU | |
| | | | | uccususc | | | | |
| 361 | gsgsaacuC | 779 | 1184-1204 | (vinu)sAfs | 1014 | 1182-1204 | AAGGAACUCU | 491 |
| | fuCfCfGfg | | | uggUfgGfAf | | | CCGGUCCACC | |
| | uccaccaua | | | ccggAfgAfg | | | AUG | |
| | | | | uuccsusu | | | | |
| 362 | ascsucucC | 780 | 1187-1207 | (vinu)sUfs | 1015 | 1185-1207 | GAACUCUCCG | 492 |
| | fgGfUfCfc | | | ccaUfgGfUf | | | GUCCACCAUG | |
| | accauggaa | | | ggacCfgGfa | | | GAG | |
| | | | | gagususc | | | | |
| 363 | csusccggU | 781 | 1190-1210 | (vinu)sUfs | 1016 | 1188-1210 | CUCUCCGGUC | 493 |
| | fcCfAfCfc | | | acuCfcAfUf | | | CACCAUGGAG | |
| | auggaguaa | | | ggugGfaCfc | | | UAC | |
| | | | | ggagsasg | | | | |
| 364 | usgsaaccC | 782 | 1221-1241 | (vinu)sGfs | 1017 | 1219-1241 | UCUGAACCCC | 494 |
| | fcAfGfUfg | | | aguAfaGfUf | | | AGUGACUUAC | |
| | acuuacuca | | | cacuGfgGfg | | | UCA | |
| | | | | uucasgsa | | | | |
| 365 | gsusgacuU | 783 | 1230-1250 | (vinu)sUfs | 1018 | 1228-1250 | CAGUGACUUA | 495 |
| | faCfUfCfa | | | acuGfaCfCf | | | CUCAGGUCAG | |
| | ggucaguaa | | | ugagUfaAfg | | | UAU | |
| | | | | ucacsusg | | | | |
| 366 | gsascuuaC | 784 | 1232-1252 | (vinu)sGfs | 1019 | 1230-1252 | GUGACUUACU | 496 |
| | fuCfAfGfg | | | auaCfuGfAf | | | CAGGUCAGUA | |
| | ucaguauca | | | ccugAfgUfa | | | UCU | |
| | | | | agucsasc | | | | |
| 367 | csusuacuC | 785 | 1234-1254 | (vinu)sUfs | 1020 | 1232-1254 | GACUUACUCA | 497 |
| | faGfGfUfc | | | agaUfaCfUf | | | GGUCAGUAUC | |
| | aguaucuaa | | | gaccUfgAfg | | | UAA | |
| | | | | uaagsusc | | | | |
| 368 | csasguauC | 786 | 1245-1265 | (vinu)sCfs | 1021 | 1243-1265 | GUCAGUAUCU | 498 |
| | fuAfAfUfa | | | gagCfuUfAf | | | AAUAUAAGCU | |
| | uaagcucga | | | uauuAfgAfu | | | CGG | |
| | | | | acugsasc | | | | |
| 369 | gsusaucuA | 787 | 1247-1267 | (vinu)sUfs | 1022 | 1245-1267 | CAGUAUCUAA | 499 |
| | faUfAfUfa | | | ccgAfgCfUf | | | UAUAAGCUCG | |
| | agcucggaa | | | uauaUfuAfg | | | GAG | |
| | | | | auacsusg | | | | |
| 370 | usasucuaA | 788 | 1248-1268 | (vinu)sCfs | 1023 | 1246-1268 | AGUAUCUAAU | 500 |
| | fuAfUfAfa | | | uccGfaGfCf | | | AUAAGCUCGG | |
| | gcucggaga | | | uuauAfuUfa | | | AGU | |
| | | | | gauascsu | | | | |
| 371 | asuscuaaU | 789 | 1249-1269 | (vinu)sAfs | 1024 | 1247-1269 | GUAUCUAAUA | 501 |
| | faUfAfAfg | | | cucCfgAfGf | | | UAAGCUCGGA | |
| | cucggagua | | | cuuaUfaUfu | | | GUU | |
| | | | | agausasc | | | | |
| 372 | uscsuaauA | 790 | 1250-1270 | (vinu)sAfs | 1025 | 1248-1270 | UAUCUAAUAU | 502 |
| | fuAfAfGfc | | | acuCfcGfAf | | | AAGCUCGGAG | |
| | ucggaguua | | | gcuuAfuAfu | | | UUU | |
| | | | | uagasusa | | | | |
| 373 | csusaauaU | 791 | 1251-1271 | (vinu)sAfs | 1026 | 1249-1271 | AUCUAAUAUA | 503 |
| | faAfGfCfu | | | aacUfcCfGf | | | AGCUCGGAGU | |
| | cggaguuua | | | agcuUfaUfa | | | UUG | |
| | | | | uuagsasu | | | | |
| 374 | usasauauA | 792 | 1252-1272 | (vinu)sCfs | 1027 | 1250-1272 | UCUAAUAUAA | 504 |
| | faGfCfUfc | | | aaaCfuCfCf | | | GCUCGGAGUU | |
| | ggaguuuga | | | gagcUfuAfu | | | UGG | |
| | | | | auuasgsa | | | | |
| 375 | asusauaaG | 793 | 1254-1274 | (vinu)sUfs | 1028 | 1252-1274 | UAAUAUAAGC | 505 |
| | fcUfCfGfg | | | ccaAfaCfUf | | | UCGGAGUUUG | |
| | aguuuggaa | | | ccgaGfcUfu | | | GAC | |
| | | | | auaususa | | | | |
| 376 | usasuaagC | 794 | 1255-1275 | (vinu)sGfs | 1029 | 1253-1275 | AAUAUAAGCU | 506 |
| | fuCfGfGfa | | | uccAfaAfCf | | | CGGAGUUUGG | |
| | guuuggaca | | | uccgAfgCfu | | | ACG | |
| | | | | uauasusu | | | | |
| 377 | asusaagcU | 795 | 1256-1276 | (vinu)sCfs | 1030 | 1254-1276 | AUAUAAGCUC | 507 |
| | fcGfGfAfg | | | gucCfaAfAf | | | GGAGUUUGGA | |
| | uuuggacga | | | cuccGfaGfc | | | CGG | |
| | | | | uuausasu | | | | |
| 378 | gscsucggA | 796 | 1260-1280 | (vinu)sCfs | 1031 | 1258-1280 | AAGCUCGGAG | 508 |
| | fgUfUfUfg | | | cucCfgUfCf | | | UUUGGACGGA | |
| | gacggagga | | | caaaCfuCfc | | | GGG | |
| | | | | gagcsusu | | | | |
| 379 | gsgsaguuU | 797 | 1264-1284 | (vinu)sAfs | 1032 | 1262-1284 | UCGGAGUUUG | 509 |
| | fgGfAfCfg | | | gacCfcUfCf | | | GACGGAGGGU | |
| | gagggucua | | | cgucCfaAfa | | | CUG | |
| | | | | cuccsgsa | | | | |
| 380 | csasccccA | 798 | 1299-1319 | (vinu)sAfs | 1033 | 1297-1319 | ACCACCCCAG | 510 |
| | fgCfGfAfc | | | cggAfaAfGf | | | CGACCUUUCC | |
| | cuuuccgua | | | gucgCfuGfg | | | GUG | |
| | | | | ggugsgsu | | | | |
| 381 | gsuscuguG | 799 | 1319-1339 | (vinu)sGfs | 1034 | 1317-1339 | GUGUCUGUGA | 511 |
| | faUfCfAfc | | | uccGfcUfUf | | | UCACAAGCGG | |
| | aagcggaca | | | gugaUfcAfc | | | ACC | |
| | | | | agacsasc | | | | |
| 382 | uscsugugA | 800 | 1320-1340 | (vinu)sGfs | 1035 | 1318-1340 | UGUCUGUGAU | 512 |
| | fuCfAfCfa | | | gucCfgCfUf | | | CACAAGCGGA | |
| | agcggacca | | | ugugAfuCfa | | | CCA | |
| | | | | cagascsa | | | | |
| 383 | csusgugaU | 801 | 1321-1341 | (vinu)sUfs | 1036 | 1319-1341 | GUCUGUGAUC | 513 |
| | fcAfCfAfa | | | gguCfcGfCf | | | ACAAGCGGAC | |
| | gcggaccaa | | | uuguGfaUfc | | | CAU | |
| | | | | acagsasc | | | | |
| 384 | usgsugauC | 802 | 1322-1342 | (vinu)sAfs | 1037 | 1320-1342 | UCUGUGAUCA | 514 |
| | faCfAfAfg | | | uggUfcCfGf | | | CAAGCGGACC | |
| | cggaccaua | | | cuugUfgAfu | | | AUC | |
| | | | | cacasgsa | | | | |
| 385 | gsusgaucA | 803 | 1323-1343 | (vinu)sGfs | 1038 | 1321-1343 | CUGUGAUCAC | 515 |
| | fcAfAfGfc | | | augGfuCfCf | | | AAGCGGACCA | |
| | ggaccauca | | | gcuuGfuGfa | | | UCC | |
| | | | | ucacsasg | | | | |
| 386 | asgsgagcU | 804 | 1371-1391 | (vinu)sUfs | 1039 | 1369-1391 | CCAGGAGCUG | 516 |
| | fgCfUfAfg | | | gcuUfuGfGf | | | CUAGCCAAAG | |
| | ccaaagcaa | | | cuagCfaGfc | | | CAU | |
| | | | | uccusgsg | | | | |
| 387 | asgscugcU | 805 | 1374-1394 | (vinu)sCfs | 1040 | 1372-1394 | GGAGCUGCUA | 517 |
| | faGfCfCfa | | | aauGfcUfUf | | | GCCAAAGCAU | |
| | aagcauuga | | | uggcUfaGfc | | | UGG | |
| | | | | agcuscsc | | | | |
| 388 | csusgcuaG | 806 | 1376-1396 | (vinu)sUfs | 1041 | 1374-1396 | AGCUGCUAGC | 518 |
| | fcCfAfAfa | | | ccaAfuGfCf | | | CAAAGCAUUG | |
| | gcauuggaa | | | uuugGfcUfa | | | GAG | |
| | | | | gcagscsu | | | | |
| 389 | usgscuagC | 807 | 1377-1397 | (vinu)sCfs | 1042 | 1375-1397 | GCUGCUAGCC | 519 |
| | fcAfAfAfg | | | uccAfaUfGf | | | AAAGCAUUGG | |
| | cauuggaga | | | cuuuGfgCfu | | | AGA | |
| | | | | agcasgsc | | | | |
| 390 | csusagccA | 808 | 1379-1399 | (vinu)sGfs | 1043 | 1377-1399 | UGCUAGCCAA | 520 |
| | faAfGfCfa | | | ucuCfcAfAf | | | AGCAUUGGAG | |
| | uuggagaca | | | ugcuUfuGfg | | | ACC | |
| | | | | cuagscsa | | | | |
| 391 | usasgccaA | 809 | 1380-1400 | (vinu)sGfs | 1044 | 1378-1400 | GCUAGCCAAA | 521 |
| | faGfCfAfu | | | gucUfcCfAf | | | GCAUUGGAGA | |
| | uggagacca | | | augcUfuUfg | | | CCC | |
| | | | | gcuasgsc | | | | |
| 392 | gsgsagcuC | 810 | 1729-1749 | (vinu)sAfs | 1045 | 1727-1749 | AGGGAGCUCC | 522 |
| | fcUfUfCfg | | | gguCfcAfAf | | | UUCGUUGGAC | |
| | uuggaccua | | | cgaaGfgAfg | | | CUC | |
| | | | | cuccscsu | | | | |
| 393 | gsasgcucc | 811 | 1730-1750 | (vinu)sGfs | 1046 | 1728-1750 | GGGAGCUCCU | 523 |
| | fuUfCfGfu | | | aggUfcCfAf | | | UCGUUGGACC | |
| | uggaccuca | | | acgaAfgGfa | | | UCC | |
| | | | | gcucscsc | | | | |
| 394 | asgscuccU | 812 | 1731-1751 | (vinu)sGfs | 1047 | 1729-1751 | GGAGCUCCUU | 524 |
| | fuCfGfUfu | | | gagGfuCfCf | | | CGUUGGACCU | |
| | ggaccucca | | | aacgAfaGfg | | | CCA | |
| | | | | agcuscsc | | | | |
| 395 | asgsgccuG | 813 | 1762-1782 | (vinu)sGfs | 1048 | 1760-1782 | CAAGGCCUGG | 525 |
| | fgGfCfCfa | | | caaCfaUfAf | | | GCCAUAUGUU | |
| | uauguugca | | | uggcCfcAfg | | | GCU | |
| | | | | gccususg | | | | |
| 396 | gscscuggG | 814 | 1764-1784 | (vinu)sCfs | 1049 | 1762-1784 | AGGCCUGGGC | 526 |
| | fcCfAfUfa | | | agcAfaCfAf | | | CAUAUGUUGC | |
| | uguugcuga | | | uaugGfcCfc | | | UGG | |
| | | | | aggcscsu | | | | |
| 397 | csusgggcC | 815 | 1766-1786 | (vinu)sCfs | 1050 | 1764-1786 | GCCUGGGCCA | 527 |
| | faUfAfUfg | | | ccaGfcAfAf | | | UAUGUUGCUG | |
| | uugcuggga | | | cauaUfgGfc | | | GGA | |
| | | | | ccagsgsc | | | | |
| 398 | usgsggccA | 816 | 1767-1787 | (vinu)sUfs | 1051 | 1765-1787 | CCUGGGCCAU | 528 |
| | fuAfUfGfu | | | cccAfgCfAf | | | AUGUUGCUGG | |
| | ugcugggaa | | | acauAfuGfg | | | GAA | |
| | | | | cccasgsg | | | | |
| 399 | asusguugC | 817 | 1775-1795 | (vinu)sGfs | 1052 | 1773-1795 | AUAUGUUGCU | 529 |
| | fuGfGfGfa | | | aggAfaAfUf | | | GGGAAUUUCC | |
| | auuuccuca | | | ucccAfgCfa | | | UCC | |
| | | | | acausasu | | | | |
| 400 | csusgggaA | 818 | 1781-1801 | (vinu)sAfs | 1053 | 1779-1801 | UGCUGGGAAU | 530 |
| | fuUfUfCfc | | | gggUfgGfAf | | | UUCCUCCACC | |
| | uccacccua | | | ggaaAfuUfc | | | CUU | |
| | | | | ccagscsa | | | | |
| 401 | ususccucC | 819 | 1789-1809 | (vinu)sCfs | 1054 | 1787-1809 | AUUUCCUCCA | 531 |
| | faCfCfCfu | | | augAfcGfAf | | | CCCUUCGUCA | |
| | ucgucauga | | | agggUfgGfa | | | UGC | |
| | | | | ggaasasu | | | | |
| 402 | asasgggcC | 820 | 1838-1858 | (vinu)sUfs | 1055 | 1836-1858 | AGAAGGGCCG | 532 |
| | fgCfCfUfc | | | aggAfaUfGf | | | CCUCCAUUCC | |
| | cauuccuaa | | | gaggCfgGfc | | | UAC | |
| | | | | ccuuscsu | | | | |
| 403 | gsgsccgcC | 821 | 1841-1861 | (vinu)sUfs | 1056 | 1839-1861 | AGGGCCGCCU | 533 |
| | fuCfCfAfu | | | aguAfgGfAf | | | CCAUUCCUAC | |
| | uccuacuaa | | | auggAfgGfc | | | UAA | |
| | | | | ggccscsu | | | | |
| 404 | ascsugcaA | 822 | 1904-1924 | (vinu)sGfs | 1057 | 1902-1924 | CCACUGCAAA | 534 |
| | faGfAfCfu | | | cugUfcAfUf | | | GACUAUGACA | |
| | augacagca | | | agucUfuUfg | | | GCA | |
| | | | | cagusgsg | | | | |
| 405 | csasgcauC | 823 | 1920-1940 | (vinu)sGfs | 1058 | 1918-1940 | GACAGCAUCA | 535 |
| | faAfAfUfu | | | gucCfuGfAf | | | AAUUUCAGGA | |
| | ucaggacca | | | aauuUfgAfu | | | CCU | |
| | | | | gcugsusc | | | | |
| 406 | uscsaggaC | 824 | 1932-1952 | (vinu)sGfs | 1059 | 1930-1952 | UUUCAGGACC | 536 |
| | fcUfGfCfa | | | uacUfgUfCf | | | UGCAGACAGU | |
| | gacaguaca | | | ugcaGfgUfc | | | ACA | |
| | | | | cugasasa | | | | |
| 407 | gscsagacA | 825 | 1941-1961 | (vinu)sAfs | 1060 | 1939-1961 | CUGCAGACAG | 537 |
| | fgUfAfCfa | | | ucuAfgCfCf | | | UACAGGCUAG | |
| | ggcuagaua | | | uguaCfuGfu | | | AUA | |
| | | | | cugcsasg | | | | |
| 408 | csasgacaG | 826 | 1942-1962 | (vinu)sUfs | 1061 | 1940-1962 | UGCAGACAGU | 538 |
| | fuAfCfAfg | | | aucUfaGfCf | | | ACAGGCUAGA | |
| | gcuagauaa | | | cuguAfcUfg | | | UAA | |
| | | | | ucugscsa | | | | |
| 409 | asgsacagU | 827 | 1943-1963 | (vinu)sUfs | 1062 | 1941-1963 | GCAGACAGUA | 539 |
| | faCfAfGfg | | | uauCfuAfGf | | | CAGGCUAGAU | |
| | cuagauaaa | | | ccugUfaCfu | | | AAC | |
| | | | | gucusgsc | | | | |
| 410 | uscsccacU | 828 | 2087-2107 | (vinu)sGfs | 1063 | 2085-2107 | CCUCCCACUU | 540 |
| | fuGfCfCfc | | | ccuUfuCfAf | | | GCCCUGAAAG | |
| | ugaaaggca | | | gggcAfaGfu | | | GCC | |
| | | | | gggasgsg | | | | |
| 411 | csusgcugC | 829 | 2148-2168 | (vinu)sGfs | 1064 | 2146-2168 | GACUGCUGCU | 541 |
| | fuAfCfAfu | | | ggaUfuAfGf | | | ACAUCUAAUC | |
| | cuaauccca | | | auguAfgCfa | | | CCC | |
| | | | | gcagsusc | | | | |
| 412 | usgscugcU | 830 | 2149-2169 | (vinu)sGfs | 1065 | 2147-2169 | ACUGCUGCUA | 542 |
| | faCfAfUfc | | | gggAfuUfAf | | | CAUCUAAUCC | |
| | uaaucccca | | | gaugUfaGfc | | | CCU | |
| | | | | agcasgsu | | | | |
| 413 | gscsugcuA | 831 | 2150-2170 | (vinu)sAfs | 1066 | 2148-2170 | CUGCUGCUAC | 543 |
| | fcAfUfCfu | | | gggGfaUfUf | | | AUCUAAUCCC | |
| | aauccccua | | | agauGfuAfg | | | CUA | |
| | | | | cagcsasg | | | | |
| 414 | ascsaucuA | 832 | 2156-2176 | (vinu)sAfs | 1067 | 2154-2176 | CUACAUCUAA | 544 |
| | faUfCfCfc | | | uugGfuAfGf | | | UCCCCUACCA | |
| | cuaccaaua | | | gggaUfuAfg | | | AUG | |
| | | | | augusasg | | | | |
| 415 | asuscuaaU | 833 | 2158-2178 | (vinu)sGfs | 1068 | 2156-2178 | ACAUCUAAUC | 545 |
| | fcCfCfCfu | | | cauUfgGfUf | | | CCCUACCAAU | |
| | accaaugca | | | agggGfaUfu | | | GCC | |
| | | | | agausgsu | | | | |
| 416 | cscsccuaC | 834 | 2165-2185 | (vinu)sAfs | 1069 | 2163-2185 | AUCCCCUACC | 546 |
| | fcAfAfUfg | | | cagGfaGfGf | | | AAUGCCUCCU | |
| | ccuccugua | | | cauuGfgUfa | | | GUC | |
| | | | | ggggsasu | | | | |
| 417 | cscscuacC | 835 | 2166-2186 | (vinu)sGfs | 1070 | 2164-2186 | UCCCCUACCA | 547 |
| | faAfUfGfc | | | acaGfgAfGf | | | AUGCCUCCUG | |
| | cuccuguca | | | gcauUfgGfu | | | UCC | |
| | | | | agggsgsa | | | | |
| 418 | ascscaauG | 836 | 2170-2190 | (vinu)sUfs | 1071 | 2168-2190 | CUACCAAUGC | 548 |
| | fcCfUfCfc | | | aggGfaCfAf | | | CUCCUGUCCC | |
| | ugucccuaa | | | ggagGfcAfu | | | UAA | |
| | | | | uggusasg | | | | |
| 419 | cscsaaugC | 837 | 2171-2191 | (vinu)sUfs | 1072 | 2169-2191 | UACCAAUGCC | 549 |
| | fcUfCfCfu | | | uagGfgAfCf | | | UCCUGUCCCU | |
| | gucccuaaa | | | aggaGfgCfa | | | AAA | |
| | | | | uuggsusa | | | | |
| 420 | asusgccuC | 838 | 2174-2194 | (vinu)sAfs | 1073 | 2172-2194 | CAAUGCCUCC | 550 |
| | fcUfGfUfc | | | guuUfaGfGf | | | UGUCCCUAAA | |
| | ccuaaacua | | | gacaGfgAfg | | | CUC | |
| | | | | gcaususg | | | | |
| 421 | usgsccucC | 839 | 2175-2195 | (vinu)sGfs | 1074 | 2173-2195 | AAUGCCUCCU | 551 |
| | fuGfUfCfc | | | aguUfuAfGf | | | GUCCCUAAAC | |
| | cuaaacuca | | | ggacAfgGfa | | | UCC | |
| | | | | ggcasusu | | | | |
| 422 | usascugaU | 840 | 2202-2222 | (vinu)sAfs | 1075 | 2200-2222 | CAUACUGAUG | 552 |
| | fgAfCfAfg | | | gagAfgGfGf | | | ACAGCCCUCU | |
| | cccucucua | | | cuguCfaUfc | | | CUG | |
| | | | | aguasusg | | | | |
| 423 | asgscucaG | 841 | 726-746 | (vinu)sGfs | 1076 | 724-746 | CCAGCUCAGC | 1132 |
| | fcAfGfUfg | | | aacGfaGfAf | | | AGUGUCUCGU | |
| | ucucguuca | | | cacuGfcUfg | | | UCC | |
| | | | | agcusgsg | | | | |
| 424 | gscsucagC | 842 | 727-747 | (vinu)sGfs | 1077 | 725-747 | CAGCUCAGCA | 1133 |
| | faGfUfGfu | | | gaaCfgAfGf | | | GUGUCUCGUU | |
| | cucguucca | | | acacUfgCfu | | | CCC | |
| | | | | gagcsusg | | | | |
| 425 | gsgsacggU | 843 | 752-772 | (vinu)sAfs | 1078 | 750-772 | GGGGACGGUA | 1134 |
| | faGfCfAfg | | | uguCfgGfUf | | | GCAGACCGAC | |
| | accgacaua | | | cugcUfaCfc | | | AUC | |
| | | | | guccscsc | | | | |
| 426 | ascsgguaG | 844 | 754-774 | (vinu)sGfs | 1079 | 752-774 | GGACGGUAGC | 1135 |
| | fcAfGfAfc | | | gauGfuCfGf | | | AGACCGACAU | |
| | cgacaucca | | | gucuGfcUfa | | | CCU | |
| | | | | ccguscsc | | | | |
| 427 | csgsguagC | 845 | 755-775 | (vinu)sAfs | 1080 | 753-775 | GACGGUAGCA | 1136 |
| | faGfAfCfc | | | ggaUfgUfCf | | | GACCGACAUC | |
| | gacauccua | | | ggucUfgCfu | | | CUU | |
| | | | | accgsusc | | | | |
| 428 | asgscagaC | 846 | 759-779 | (vinu)sCfs | 1081 | 757-779 | GUAGCAGACC | 1137 |
| | fcGfAfCfa | | | agaAfgGfAf | | | GACAUCCUUC | |
| | uccuucuga | | | ugucGfgUfc | | | UGG | |
| | | | | ugcusasc | | | | |
| 429 | gscsagacC | 847 | 760-780 | (vinu)sCfs | 1082 | 758-780 | UAGCAGACCG | 1138 |
| | fgAfCfAfu | | | cagAfaGfGf | | | ACAUCCUUCU | |
| | ccuucugga | | | auguCfgGfu | | | GGG | |
| | | | | cugcsusa | | | | |
| 430 | uscscaugC | 848 | 894-914 | (vinu)sGfs | 1083 | 892-914 | CUUCCAUGCA | 1139 |
| | faAfCfUfg | | | ugaUfgGfAf | | | ACUGUCCAUC | |
| | uccaucaca | | | caguUfgCfa | | | ACG | |
| | | | | uggasasg | | | | |
| 431 | cscsaugcA | 849 | 895-915 | (vinu)sCfs | 1084 | 893-915 | UUCCAUGCAA | 1140 |
| | faCfUfGfu | | | gugAfuGfGf | | | CUGUCCAUCA | |
| | ccaucacga | | | acagUfuGfc | | | CGG | |
| | | | | auggsasa | | | | |
| 432 | csasugcaA | 850 | 896-916 | (vinu)sCfs | 1085 | 894-916 | UCCAUGCAAC | 1141 |
| | fcUfGfUfc | | | cguGfaUfGf | | | UGUCCAUCAC | |
| | caucacgga | | | gacaGfuUfg | | | GGC | |
| | | | | caugsgsa | | | | |
| 433 | asascuguC | 851 | 901-921 | (vinu)sUfs | 1086 | 989-921 | GCAACUGUCC | 1142 |
| | fcAfUfCfa | | | gcaGfcCfGf | | | AUCACGGCUG | |
| | cggcugcaa | | | ugauGfgAfc | | | CAA | |
| | | | | aguusgsc | | | | |
| 434 | ascsugucC | 852 | 902-922 | (vinu)sUfs | 1087 | 900-922 | CAACUGUCCA | 1143 |
| | faUfCfAfc | | | ugcAfgCfCf | | | UCACGGCUGC | |
| | ggcugcaaa | | | gugaUfgGfa | | | AAC | |
| | | | | cagususg | | | | |
| 435 | gsusccauC | 853 | 905-925 | (vinu)sCfs | 1088 | 903-925 | CUGUCCAUCA | 1144 |
| | faCfGfGfc | | | aguUfgCfAf | | | CGGCUGCAAC | |
| | ugcaacuga | | | gccgUfgAfu | | | UGA | |
| | | | | ggacsasg | | | | |
| 436 | asuscacgG | 854 | 909-929 | (vinu)sAfs | 1089 | 907-929 | CCAUCACGGC | 1145 |
| | fcUfGfCfa | | | uuuCfaGfUf | | | UGCAACUGAA | |
| | acugaaaua | | | ugcaGfcCfg | | | AUC | |
| | | | | ugausgsg | | | | |
| 437 | usgsggacA | 855 | 935-955 | (vinu)sUfs | 1090 | 933-955 | GCUGGGACAC | 1146 |
| | fcAfGfCfg | | | ucuGfgUfGf | | | AGCGCACCAG | |
| | caccagaaa | | | cgcuGfuGfu | | | AAG | |
| | | | | cccasgsc | | | | |
| 438 | gsascacaG | 856 | 938-958 | (vinu)sAfs | 1091 | 936-958 | GGGACACAGC | 1147 |
| | fcGfCfAfc | | | gcuUfcUfGf | | | GCACCAGAAG | |
| | cagaagcua | | | gugcGfcUfg | | | CUA | |
| | | | | ugucscsc | | | | |
| 439 | ascsagcgC | 857 | 941-961 | (vinu)sUfs | 1092 | 939-961 | ACACAGCGCA | 1148 |
| | faCfCfAfg | | | uuaGfcUfUf | | | CCAGAAGCUA | |
| | aagcuaaaa | | | cuggUfgCfg | | | AAG | |
| | | | | cugusgsu | | | | |
| 440 | gscscaCfa | 858 | 1659-1677 | (vinu)sGfs | 1093 | 1659-1679 | AAGCCACAUU | 1149 |
| | UfUfCfuac | | | agcCfcGfUf | | | CUACGGGCUC | |
| | gggcuca | | | agaaUfgUfg | | | U | |
| | | | | gcsusu | | | | |
| 441 | gsasaaGfu | 859 | 1715-1733 | (vinu)sAfs | 1094 | 1715-1735 | AAGAAAGUAC | 1150 |
| | AfCfUfcag | | | gcuCfcCfUf | | | UCAGGGAGCU | |
| | ggagcua | | | gaguAfcUfu | | | C | |
| | | | | ucsusu | | | | |
| 442 | gsuscuAfu | 860 | 2033-2051 | (vinu)sUfs | 1095 | 2033-2053 | AAGUCUAUAC | 1151 |
| | AfCfCfcuu | | | cagGfuAfAf | | | CCUUACCUGA | |
| | accugaa | | | ggguAfuAfg | | | A | |
| | | | | acsusu | | | | |
| 443 | gscsugCfu | 861 | 1373-1391 | (vinu)sAfs | 1096 | 1373-1393 | GAGCUGCUAG | 1152 |
| | AfGfCfcaa | | | augCfuUfUf | | | CCAAAGCAUU | |
| | agcauua | | | ggcuAfgCfa | | | G | |
| | | | | gcsusc | | | | |
| 444 | gsgsagUfg | 862 | 1534-1552 | (vinu)sAfs | 1097 | 1534-1554 | AAGGAGUGGA | 1153 |
| | GfAfGfugc | | | ugaCfaGfCf | | | GUGCUGUCAU | |
| | ugucaua | | | acucCfaCfu | | | A | |
| | | | | ccsusu | | | | |
| 445 | gsgsccAfa | 863 | 2102-2120 | (vinu)sGfs | 1098 | 2102-2122 | AAGGCCAAGA | 1154 |
| | GfAfUfcaa | | | acaUfcUfUf | | | UCAAGAUGUC | |
| | gauguca | | | gaucUfuGfg | | | C | |
| | | | | ccsusu | | | | |
| 446 | csusugAfg | 864 | 2228-2246 | (vinu)sAfs | 1099 | 2228-2248 | ACCUUGAGAU | 1155 |
| | AfUfCfugu | | | ugaAfgAfCf | | | CUGUCUUCAU | |
| | cuucaua | | | agauCfuCfa | | | ACC | |
| | | | | agsusu | | | | |
| 447 | csusugAfg | 864 | 2228-2246 | (vinu)sAfs | 1100 | 2228-2248 | UUACCUUGAG | 1156 |
| | AfUfCfugu | | | ugaAfgAfCf | | | AUCUGUCUUC | |
| | cuucaua | | | agauCfuCfa | | | AUA | |
| | | | | agsgsu | | | | |
| 448 | cscsucAfa | 865 | 2254-2272 | (vinu)sGfs | 1101 | 2254-2274 | CCCCUCAAAC | 1157 |
| | AfCfUfaac | | | uuuUfuGfUf | | | UAACAAAAAC | |
| | aaaaaca | | | uaguUfuGfa | | | A | |
| | | | | ggsgsg | | | | |
| 449 | csuscaAfa | 866 | 2255-2273 | (vinu)sUfs | 1102 | 2255-2275 | CCCUCAAACU | 1158 |
| | CfUfAfaca | | | guuUfuUfGf | | | AACAAAAACA | |
| | aaaacaa | | | uuagUfuUfg | | | U | |
| | | | | agsgsg | | | | |
| 450 | csasaaCfu | 867 | 2257-2275 | (vinu)sAfs | 1103 | 2257-2277 | CUCAAACUAA | 1159 |
| | AfAfCfaaa | | | augUfuUfUf | | | CAAAAACAUU | |
| | aacauua | | | uguuAfgUfu | | | U | |
| | | | | ugsasg | | | | |
| 451 | csusaaCfa | 868 | 2261-2279 | (vinu)sUfs | 1104 | 2261-2281 | AACUAACAAA | 1160 |
| | AfAfAfaca | | | ggaAfaUfGf | | | AACAUUUCCA | |
| | uuuccaa | | | uuuuUfgUfu | | | A | |
| | | | | agsusu | | | | |
| 452 | csasaaAfa | 869 | 2265-2283 | (vinu)sUfs | 1105 | 2265-2285 | AACAAAAACA | 1161 |
| | CfAfUfuuc | | | uauUfgGfAf | | | UUUCCAAUAA | |
| | caauaaa | | | aaugUfuUfu | | | A | |
| | | | | ugsusu | | | | |
| 453 | cscsaaUfa | 870 | 2276-2294 | (vinu)sAfs | 1106 | 2276-2296 | UUCCAAUAAA | 1162 |
| | AfAfAfaua | | | uuuGfaUfAf | | | AAUAUCAAAU | |
| | ucaaaua | | | uuuuUfaUfu | | | A | |
| | | | | ggsasa | | | | |
| 454 | csasauAfa | 871 | 2277-2295 | (vinu)sUfs | 1107 | 2277-2297 | UCCAAUAAAA | 1163 |
| | AfAfAfuau | | | auuUfgAfUf | | | AUAUCAAAUA | |
| | caaauaa | | | auuuUfuAfu | | | U | |
| | | | | ugsgsa | | | | |
| 455 | cscsaaAfg | 872 | 1381-1399 | (vinu)sGfs | 1108 | 1381-1401 | AGCCAAAGCA | 1164 |
| | CfAfUfugg | | | gguCfuCfCf | | | UUGGAGACCC | |
| | agaccca | | | aaugCfuUfu | | | U | |
| | | | | ggsusu | | | | |
| 456 | csasggUfc | 873 | 1238-1256 | (vinu)sAfs | 1109 | 1238-1258 | CUCAGGUCAG | 1165 |
| | AfGfUfauc | | | uauUfaGfAf | | | UAUCUAAUAU | |
| | uaauaua | | | uacuGfaCfc | | | A | |
| | | | | ugsusu | | | | |
| 457 | asusguCfa | 874 | 1651-1669 | (vinu)sAfs | 1110 | 1651-1671 | GAAUGUCAAA | 1166 |
| | AfAfGfcca | | | gaaUfgUfGf | | | GCCACAUUCU | |
| | cauucua | | | gcuuUfgAfc | | | A | |
| | | | | aususc | | | | |
| 458 | gscsucUfa | 875 | 1673-1691 | (vinu)sCfs | 1111 | 1673-1693 | GGGCUCUACU | 1167 |
| | CfUfCfuau | | | aacUfcAfUf | | | CUAUGAGUUG | |
| | gaguuga | | | agagUfaGfa | | | U | |
| | | | | gcsusu | | | | |
| 459 | csusauGfa | 876 | 1681-1699 | (vinu)sGfs | 1112 | 1681-1701 | CUCUAUGAGU | 1168 |
| | GfUfUfgug | | | aaaGfuCfAf | | | UGUGACUUUC | |
| | acuuuca | | | caacUfcAfu | | | A | |
| | | | | agsasg | | | | |
| 460 | usasugAfg | 877 | 1682-1700 | (vinu)sUfs | 1113 | 1682-1702 | UCUAUGAGUU | 1169 |
| | UfUfGfuga | | | gaaAfgUfCf | | | GUGACUUUCA | |
| | cuuucaa | | | acaaCfuCfa | | | A | |
| | | | | uasgsa | | | | |
| 461 | gsgsccCfa | 878 | 1707-1725 | (vinu)sGfs | 1114 | 1707-1727 | UUGGCCCAAA | 1170 |
| | AfAfGfaaa | | | aguAfcUfUf | | | GAAAGUACUC | |
| | guacuca | | | ucuuUfgGfg | | | A | |
| | | | | ccsusu | | | | |
| 462 | gscscaUfa | 879 | 1768-1786 | (vinu)sUfs | 1115 | 1768-1788 | GGGCCAUAUG | 1171 |
| | UfGfUfugc | | | uccCfaGfCf | | | UUGCUGGGAA | |
| | ugggaaa | | | aacaUfaUfg | | | U | |
| | | | | gcsusu | | | | |
| 463 | cscscaCfu | 880 | 1899-1979 | (vinu)sCfs | 1116 | 1899-1981 | GACCCACUGC | 1172 |
| | GfCfAfaag | | | auaGfuCfUf | | | AAAGACUAUG | |
| | acuauga | | | uugcAfgUfg | | | A | |
| | | | | ggsusu | | | | |
| 464 | gsascuAfu | 881 | 1910-1928 | (vinu)sUfs | 1117 | 1910-1930 | AAGACUAUGA | 1173 |
| | GfAfCfagc | | | uugAfuGfCf | | | CAGCAUCAAA | |
| | aucaaaa | | | ugucAfuAfg | | | U | |
| | | | | ucsusu | | | | |
| 465 | csusauGfa | 882 | 1912-1930 | (vinu)sAfs | 1118 | 1912-1932 | GACUAUGACA | 1174 |
| | CfAfGfcau | | | auuUfgAfUf | | | GCAUCAAAUU | |
| | caaauua | | | gcugUfcAfu | | | U | |
| | | | | agsusc | | | | |
| 466 | csusgaAfg | 883 | 2047-2065 | (vinu)sAfs | 1119 | 2047-2067 | ACCUGAAGAA | 1175 |
| | AfAfUfgcu | | | agaAfcAfGf | | | UGCUGUUCUU | |
| | guucuua | | | cauuCfuUfc | | | U | |
| | | | | agsusu | | | | |
| 467 | csusgaAfg | 883 | 2047-2065 | (vinu)sAfs | 1120 | 2047-2067 | ACCUGAAGAA | 1176 |
| | AfAfUfgcu | | | agaAfcAfGf | | | UGCUGUUCUU | |
| | guucuua | | | cauuCfuUfc | | | U | |
| | | | | agsgsu | | | | |
| 468 | cscsugAfa | 884 | 2095-2113 | (vinu)sUfs | 1121 | 2095-2115 | GCCCUGAAAG | 1177 |
| | AfGfGfcca | | | gauCfuUfGf | | | GCCAAGAUCA | |
| | agaucaa | | | gccuUfuCfa | | | A | |
| | | | | ggsusu | | | | |
| 469 | cscsugAfa | 884 | 2095-2113 | (vinu)sUfs | 1122 | 2095-2115 | GCCCUGAAAG | 1178 |
| | AfGfGfcca | | | gauCfuUfGf | | | GCCAAGAUCA | |
| | agaucaa | | | gccuUfuCfa | | | A | |
| | | | | ggsgsc | | | | |
| 470 | gsascuGfc | 885 | 2144-2162 | (vinu)sUfs | 1123 | 2144-2164 | CUGACUGCUG | 1179 |
| | UfGfCfuac | | | uagAfuGfUf | | | CUACAUCUAA | |
| | aucuaaa | | | agcaGfcAfg | | | U | |
| | | | | ucsusu | | | | |
| 471 | asgsguCfa | 886 | 1239-1257 | (vinu)sUfs | 1124 | 1239-1259 | UCAGGUCAGU | 1180 |
| | GfUfAfucu | | | auaUfuAfGf | | | AUCUAAUAUA | |
| | aauauaa | | | auacUfgAfc | | | A | |
| | | | | cususu | | | | |
| 472 | gsgsaaUfu | 887 | 1782-1800 | (vinu)sAfs | 1125 | 1782-1802 | UGGGAAUUUC | 1181 |
| | UfCfCfucc | | | aggGfuGfGf | | | CUCCACCCUU | |
| | acccuua | | | aggaAfaUfu | | | C | |
| | | | | ccsusu | | | | |
| 473 | gsasuuCfa | 888 | 1597-1615 | (vinu)sAfs | 1126 | 1597-1617 | CCGAUUCACC | 1182 |
| | CfCfUfuug | | | cacGfuCfAf | | | UUUGACGUGU | |
| | acgugua | | | aaggUfgAfa | | | A | |
| | | | | ucsusu | | | | |
| 474 | gsasggAfu | 889 | 1479-1497 | (vinu)sCfs | 1127 | 1479-1499 | UGGAGGAUGA | 1183 |
| | GfAfCfacg | | | aggCfaCfGf | | | CACGUGCCUG | |
| | ugccuga | | | ugucAfuCfc | | | A | |
| | | | | ucsusu | | | | |
| 475 | csuscuAfu | 890 | 1679-1697 | (vinu)sAfs | 1128 | 1679-1699 | UACUCUAUGA | 1184 |
| | GfAfGfuug | | | aguCfaCfAf | | | GUUGUGACUU | |
| | ugacuua | | | acucAfuAfg | | | U | |
| | | | | agsusa | | | | |
| 476 | asgsagGfa | 891 | 1430-1448 | (vinu)sGfs | 1129 | 1430-1450 | CUAGAGGAGG | 1185 |
| | GfGfAfugg | | | cagUfuCfCf | | | AUGGAACUGC | |
| | aacugca | | | auccUfcCfu | | | A | |
| | | | | cusasg | | | | |
| 477 | gsasuuCfa | 888 | 1597-1615 | (vinu)sAfs | 1130 | 1597-1617 | CCGAUUCACC | 1186 |
| | CfCfUfuug | | | cacGfuCfAf | | | UUUGACGUGU | |
| | acgugua | | | aaggUfgAfa | | | A | |
| | | | | ucsgsg | | | | |
| 478 | uscsagGfu | 892 | 1237-1255 | (vinu)sUfs | 1131 | 1237-1257 | ACUCAGGUCA | 1187 |
| | CfAfGfuau | | | auuAfgAfUf | | | GUAUCUAAUA | |
| | cuaauaa | | | acugAfcCfu | | | U | |
| | | | | gasusu | | | | |
| 479 | csasguauC | 786 | 1245-1265 | (vinu)sCfs | 1188 | 1243-1265 | GUCAGUAUCU | 498 |
| | fuAfAfUfa | | | gagCfuuaua | | | AAUAUAAGCU | |
| | uaagcucga | | | uuAfgAfuac | | | CGG | |
| | | | | ugsasc | | | | |
| 480 | usasauauA | 792 | 1252-1272 | (vinu)sCfs | 1189 | 1250-1272 | UCUAAUAUAA | 504 |
| | faGfCfUfc | | | aaaCfuccga | | | GCUCGGAGUU | |
| | ggaguuuga | | | gcUfuAfuau | | | UGG | |
| | | | | uasgsa | | | | |
| 481 | csasguauC | 786 | 1245-1265 | (vinu)sCfs | 1190 | 1243-1265 | GUCAGUAUCU | 498 |
| | fuAfAfUfa | | | gagCfuuaua | | | AAUAUAAGCU | |
| | uaagcucga | | | uuAfgauacu | | | CGG | |
| | | | | gsasc | | | | |
| 482 | csasgaCfa | 1192 | 1942-1962 | (vinu)sUfs | 1191 | 1940-1962 | UGCAGACAGU | 538 |
| | guAfCfAfg | | | aucUfagccu | | | ACAGGCUAGA | |
| | gcuagauaa | | | guAfcugucu | | | UAA | |
| | | | | gscsa | | | | |

[0630] The nucleotide sequence presented in Table 3, utilize the following abbreviations set forth in Table 4.

TABLE 4
Abbreviations of Nucleotide Modifications.

| Abbreviation | Nucleotide/Linkage |
|---|---|
| (vin) | vinyl-phosphonate |
| (vinu) | 5′-vinyl-phosphonate-2′-O-methyluridine |
| a | 2′-O-methyladenosine |
| c | 2′-O-methylcytidine |
| g | 2′-O-methylguanosine |
| u | 2′-O-methyluridine |
| Af | 2′-fluoroadenosine |
| Cf | 2′-fluorocytidine |
| Gf | 2′-fluoroguanosine |
| Uf | 2′-fluorouridine |
| S | Phosphorothioate linkage (between the two bases) |

[0631] Various salts, mixed salts and free acid forms of the dsRNA agents are also provided herein. In some embodiments, the dsRNA agent is in a free acid form. In some embodiments, the dsRNA agent is in a salt form. In some embodiments, the dsRNA agent is in a sodium salt form. In some embodiments, wherein the dsRNA agent is in the sodium salt form, sodium ions are present in the composition comprising the dsRNA agent as counterions for substantially all of the phosphodiester or phosphorothioate groups present in the dsRNA agent. In some embodiments, wherein the dsRNA agent is in the sodium salt form, sodium ions are present in the agent as counterions for all of the phosphodiester or phosphorothioate groups present in the dsRNA agent.

### 4.3 Modified RNAi Agents

[0632] In some embodiments, the agent (or any component thereof (e.g., any nucleic acid molecule thereof)) (e.g., described herein, e.g., an antisense strand, a sense strand, a dsRNA agent, RNAi agent, etc.) comprises one or more modified nucleotide(s) (as defined herein). The modified agent may have one or more different (e.g., improved) properties relative to a corresponding unmodified agent. For example, the modified agent may exhibit decreased immunostimulatory activity (e.g., when administered to a subject), increased stability (e.g., in vivo, in a cell, when administered to a subject), and/or increased inhibition of expression of a target nucleic acid molecule (e.g., a target mRNA (e.g., a CIDEB mRNA)), or any combination thereof.

### 4.3.1 Nature of Nucleotide Modifications

[0633] Nucleotide modifications can include modification to any one of more of the nucleoside and/or the internucleoside linkage. Nucleoside modifications include modification to the sugar (e.g., ribose) moiety and/or the nucleobase. In some embodiments, the modified agent (or component thereof) (e.g., antisense strand, sense strand, dsRNA agent, etc.) comprises one or more nucleotides comprising a modified sugar moiety. In some embodiments, the modified agent (or component thereof) (e.g., antisense strand, sense strand, dsRNA agent, etc.) comprises one or more nucleotides comprising a modified nucleobase. In some embodiments, the modified agent (or component thereof) (e.g., antisense strand, sense strand, dsRNA agent, etc.) comprises one or more nucleotides comprising a modified internucleoside linkage. In some embodiments, the modified agent (or component thereof) (e.g., antisense strand, sense strand, dsRNA agent, etc.) comprises one or more nucleotides comprising one, two, or three of a modified sugar moiety, a modified nucleobase, and/or a modified internucleoside linkage.

[0634] Exemplary nucleotide modifications are described below and also known in the art, see, e.g., WO2021257782, WO2013075035, WO2022246251, and WO2022271573, the entire contents of each of which is incorporated by reference herein for all purposes. Exemplary modifications are further provided in Hu, B., Zhong, L., Weng, Y. et al. Therapeutic siRNA: state of the art. Sig Transduct Target Ther 5, 101 (2020). https://doi.org/10.1038/s41392-020-0207-x (e.g., Table 2), the entire contents of each of which is incorporated by reference herein for all purposes.

### 4.3.1.1 Modified Nucleosides

[0635] In some embodiments, the modified agent (or any component thereof) (e.g., antisense strand, sense strand, dsRNA agent, etc.) comprises one or more nucleotide comprising a modified nucleoside. As discussed above, nucleoside modifications can include modification of the sugar (e.g., ribose) moiety and/or modification of the nucleobase.

### (i) Sugar Modifications

[0636] In some embodiments, the modified agent (or any component thereof) (e.g., antisense strand, sense strand, dsRNA agent, etc.) comprises one or more nucleotides comprising a modified sugar (e.g., ribose) moiety.

[0637] The modified sugar (e.g., ribose) moiety can comprise, for example, a substituent at any one or more position of the sugar (e.g., ribose), including e.g., positions 2′, 4′, and/or 5′. In some embodiments, the modified sugar (e.g., ribose) comprises a substituent at 2′ position of the sugar (e.g., ribose). In some embodiments, the modified sugar (e.g., ribose) comprises a substituent at 5′ position of the sugar (e.g., ribose). In some embodiments, the modified sugar (e.g., ribose) comprises a substituent at 5′ position of the sugar (e.g., ribose).

[0638] In some embodiments, the agent (or any component thereof) comprises any one or more of the following substituents (e.g., at any position of the sugar (e.g., ribose) (e.g., at position 2′)): a group for improving the stability of the agent, a group for improving the pharmacokinetic properties of the agent, or a group for improving the pharmacodynamic properties of the agent, an RNA cleaving group, a reporter group, an intercalator, or other substituents having similar properties.

[0639] Exemplary substituents include, for example, but are not limited to, substitution (e.g., at any position of the sugar (e.g., ribose) (e.g., at position 2′)) with any one of the following: OH; F; O—, S—, or N-alkyl; O—, S—, or N-alkenyl; O-, S- or N-alkynyl; or O-alkyl-O-alkyl, wherein the alkyl, alkenyl and alkynyl can be substituted or unsubstituted C₁ to C₁₀ alkyl or C₂ to C₁₀ alkenyl and alkynyl. Additional exemplary substitutions (e.g., at any position of the sugar (e.g., ribose) (e.g., at position 2′)) include, for example, but are not limited to, substitution with any one of the following: O[(CH₂)ₙO]m, CH₃, O(CH₂)ₙOCH₃, O(CH₂)ₙNH₂, O(CH₂)ₙCH₃, O(CH₂)ₙONH₂, and O(CH₂)ₙON [(CH₂)ₙCH₃)]₂, where n and m are from 1 to about 10.

[0640] In some embodiments, the modified sugar (e.g., ribose) comprises any one of the following modifications: 2′-O-methyl (2′-OMe), 2′O-methoxyethyl (2′-O-MOE), 2′deoxy-2′-fluoro (2′-F), 2′-arabino-fluoro (2′-Ara-F), 2′-O-benzyl, 2′-O-methyl-4-pyridine (2-O-methyl-4-pyridine (2′-O—CH2Py(4)).

[0641] In some embodiments, the agent (or any component thereof) comprises any of the following substituents at the 2′-position of the sugar (e.g., ribose): C₁ to C₁₀ lower alkyl, substituted lower alkyl, alkaryl, aralkyl, O-alkaryl or O-aralkyl, SH, SCH₃, OCN, Cl, Br, CN, CF₃, OCF₃, SOCH₃, SO₂CH₃, ONO₂, NO₂, N₃, NH₂, heterocycloalkyl, heterocycloalkaryl, aminoalkylamino, polyalkylamino, or a substituted silyl. In some embodiments, the agent (or any component thereof) comprises a 2′-methoxyethoxy (2′-O—CH₂CH₂OCH₃, also known as 2′-O-(2-methoxyethyl) or 2′-MOE) (see, e.g., Martin et al., Helv. Chim. Acta, 1995, 78:486-504, the entire contents of which is incorporated by reference herein for all purposes) (i.e., an alkoxy-alkoxy group). In some embodiments, the agent (or any component thereof) comprises a 2′-dimethylaminooxyethoxy, i.e., a O(CH₂)₂ON(CH₃)₂ group, also known as 2′-DMAOE; a 2′-dimethylaminoethoxyethoxy (also known in the art as 2′-O-dimethylaminoethoxyethyl or 2′-DMAEOE), i.e., 2′-O—CH₂—O—CH₂—N(CH₃) 2; a 5′-Me-2′-F nucleotide, a 5′-Me-2′-OMe nucleotide, a 5′-Me-2′-deoxynucleotide, (both R and S isomers in these three families); a 2′-alkoxyalkyl; and 2′-NMA (N-methylacetamide).

[0642] Exemplary US patents that describe the preparation of such modified sugar structures include, but are not limited to, U.S. Pat. Nos. 4,981,957; 5,118,800; 5,319,080; 5,359,044; 5,393,878; 5,446,137; 5,466,786; 5,514,785; 5,519,134; 5,567,811; 5,576,427; 5,591,722; 5,597,909; 5,610,300; 5,627,053; 5,639,873; 5,646,265; 5,658,873; 5,670,633; and 5,700,920; the entire contents of each of the foregoing are hereby incorporated herein by reference for all purposes. Exemplary sugar modifications are further provided in Hu, B., Zhong, L., Weng, Y. et al. Therapeutic siRNA: state of the art. Sig Transduct Target Ther 5, 101 (2020). https://doi.org/10.1038/s41392-020-0207-x (e.g., Table 2), the entire contents of each of which is incorporated by reference herein for all purposes.

### (a) Non-Bicyclic Sugar Modifications

[0643] In some embodiments, the modified sugar (e.g., ribose) moiety comprises a non-bicyclic modified sugar (e.g., ribose) moiety. In some embodiments, the modified sugar (e.g., ribose) moiety comprises a furanosyl ring comprising one or more substituent groups none of which bridges two atoms of the furanosyl ring to form a bicyclic structure. In some embodiments one or more non-bridging substituent of a non-bicyclic modified sugar moiety is branched. Such non bridging substituents may be at any position of the furanosyl, including but not limited to substituents at the 2′, 4′, and/or 5′ positions.

[0644] In some embodiments, non-bicyclic modified sugar moiety comprises a substituent group at the 2′-position of the sugar (e.g., ribose). Examples of 2′-substituent groups suitable for non-bicyclic modified sugar moieties include but are not limited to: 2′-O-methyl (2′-OMe), 2′O-methoxyethyl (2′-O-MOE), 2′deoxy-2′-fluoro (2′-F), 2′-arabino-fluoro (2′-Ara-F), 2′-O-benzyl, 2′-O-methyl-4-pyridine (2-O-methyl-4-pyridine (2′-O—CH₂Py (4)), and 2′-O—N-alkyl acetamide (e.g., 2′-O—N-methyl acetamide (“NMA”), 2′-O—N-dimethyl acetamide, 2′-O—N-ethyl acetamide, and 2′-O—N-propyl acetamide). For example, see, e.g., U.S. Pat. No. 6,147,200, Prakash et al., 2003, Org. Lett., 5, 403-6, the entire contents of which is incorporated by reference herein for all purposes.

[0645] In some embodiments, the 2′-substituent group is a halo, allyl, amino, azido, SH, CN, OCN, CF₃, OCF₃, O—C₁-C₁₀ alkoxy, O—C₁-C₁₀ substituted alkoxy, O—C₁-C₁₀ alkyl, O—C₁-C₁₀ substituted alkyl, S-alkyl, N(Rₘ)-alkyl, O-alkenyl, S-alkenyl, N(Rₘ)-alkenyl, O-alkynyl, S-alkynyl, N(Rₘ)-alkynyl, O-alkylenyl-O-alkyl, alkynyl, alkaryl, aralkyl, O-alkaryl, O-aralkyl, O(CH2)2SCH3,0(CH2)2ON(Rm)(Rn) or OCH2C(═O)—N(Rm)(Rn), where each Rₘ and Rₙ is, independently, H, an amino protecting group, or substituted or unsubstituted C₁-C₁₀ alkyl, or a 2′-substituent group described in any one of the following: Cook et al., U.S. Pat. No. 6,531,584; Cook et al., U.S. Pat. No. 5,859,221; and Cook et al., U.S. Pat. No. 6,005,087, the entire contents of which are incorporated herein by reference for all purposes. In some embodiments, these 2′-substituent groups can be further substituted with one or more substituent groups independently selected from among: hydroxyl, amino, alkoxy, carboxy, benzyl, phenyl, nitro (NO₂), thiol, thioalkoxy, thioalkyl, halogen, alkyl, aryl, alkenyl and alkynyl.

[0646] In some embodiments, a 2′-substituted non-bicyclic modified nucleoside comprises a sugar moiety comprising a non-bridging 2′-substituent group selected from: F, NH₂, N₃, OCF₃, OCH₃, O(CH₂)₃NH₂, CH₂CH═CH₂, OCH₂CH═CH₂, OCH₂CH₂OCH₃, O(CH₂)₂SCH₃, O(CH₂)₂ON(Rₘ)(Rₙ), O(CH₂)₂O(CH₂)₂N(CH₃)₂, and N-substituted acetamide (OCH₂C(═O)—N(Rₘ)(Rₙ)), where each Rₘ and Rₙ is, independently, H, an amino protecting group, or substituted or unsubstituted C₁-C₁₀ alkyl. In some embodiments, a 2′-substituted non-bicyclic modified nucleoside comprises a sugar moiety comprising a non-bridging 2′-substituent group selected from: F, OCF, OCH₃, OCH₂CH₂OCH₃, O(CH₂)₂SCH₃, O(CH₂)₂ON(CH₃)₂, O(CH₂)₂O(CH₂)₂N(CH₃)₂, and OCH₂C(═O)—N(H)CH₃ (“NMA”). In some embodiments, a 2′-substituted non-bicyclic modified nucleoside comprises a sugar moiety comprising a non-bridging 2′-substituent group selected from: F, OCH₃, OCH₂CH₂OCH₃, and OCH₂C(═O)—N(H)CH₃.

[0647] In some embodiments, non-bicyclic modified sugar moiety comprises a substituent group at the 3′-position of the sugar (e.g., ribose). Examples of substituent groups suitable for the 3′-position of modified sugar moieties include but are not limited to alkoxy (e.g., methoxy), alkyl (e.g., methyl, ethyl).

[0648] In some embodiments, non-bicyclic modified sugar moiety comprises a substituent group at the 4′-position of the sugar (e.g., ribose). Examples of 4′-substituent groups suitable for non-bicyclic modified sugar moieties include but are not limited to alkoxy (e.g., methoxy), alkyl, and those described in Manoharan et al., WO 2015/106128.

[0649] In some embodiments, non-bicyclic modified sugar moiety comprises a substituent group at the 5′-position of the sugar (e.g., ribose). Examples of substituent groups suitable for the 5′-position of modified sugar moieties include, but are not limited to, vinyl (e.g., 5′-vinyl), alkoxy (e.g., methoxy (e.g., 5′-methoxy)), and alkyl (e.g., methyl (R or S) (e.g., 5′-methyl (R or S)), ethyl).

[0650] In some embodiments, non-bicyclic modified sugar moieties comprise more than one non-bridging sugar substituent, for example, 2′-F-5′-methyl sugar moieties and the modified sugar moieties and modified nucleosides described in Migawa et al., WO 2008/101157 and Rajeev et al., US2013/0203836, the entire contents of each of which is incorporated herein by reference for all purposes.

[0651] In some embodiments, modified furanosyl sugar moieties and nucleosides incorporating such modified furanosyl sugar moieties are further defined by isomeric configuration. For example, a 2′-deoxyfuranosyl sugar moiety may be in seven isomeric configurations other than the naturally occurring β-D-deoxyribosyl configuration. Such modified sugar moieties are described in, e.g., WO 2019/157531, the entire contents of which are incorporated by reference herein for all purposes.

[0652] In some embodiments, the sugar (e.g., ribose) modification comprises an unlocked nucleotide (UNA). UNA is unlocked acyclic nucleic acid, wherein any of the bonds of the sugar has been removed, forming an unlocked sugar (e.g., ribose) residue. For example, in some embodiments, the bonds between C1′-C4′ have been removed (i.e., the covalent carbon-oxygen-carbon bond between the C1′ and C4′ carbons). In some embodiments, the C2′-C3′ bond (i.e., the covalent carbon-carbon bond between the C2′ and C3′ carbons) of the sugar (e.g., ribose) have been removed. See, e.g., Nuc. Acids Symp. Series, 52, 133-134 (2008) and Fluiter et al., Mol. Biosyst., 2009, 10, 1039, the entire contents of which are incorporated herein by reference. UNAs and methods of making are known in the art. See, e.g., U.S. Pat. No. 8,314,227; and US2013/0096289; US2013/0011922; and US2011/0313020, the entire contents of each of which are hereby incorporated herein by reference.

### (b) Bicyclic Sugar Modifications

[0653] In some embodiments, the modified sugar (e.g., ribose) moiety comprises a substituent that bridges two atoms of the furanosyl ring to form a second ring, resulting in a bicyclic sugar (e.g., ribose) moiety. In some embodiments, the bicyclic sugar (e.g., ribose) moiety comprises a bridge between the 4′ and the 2′ furanose ring atoms. Examples of such 4′ to 2′ bridging sugar substituents include but are not limited to: 4′-CH₂-2′, 4′-(CH₂)₂-2′, 4′-(CH₂)₃-2′, 4′-CH₂—O-₂′ (“LNA”), 4′-CH₂—S-2′, 4′-(CH₂)₂—O-2′ (“ENA”), 4′-CH(CH₃)—O-2′ (referred to as “constrained ethyl” or “cEt”), 4′-CH₂—O—CH₂-2′, 4′-CH₂—N(R)-2′, 4′-CH(CH₂OCH₃)—O-2′ (“constrained MOE” or “cMOE”) and analogs thereof (see, e.g., Seth et al., U.S. Pat. No. 7,399,845, Bhat et al., U.S. Pat. No. 7,569,686, Swayze et al., U.S. Pat. No. 7,741,457, and Swayze et al., U.S. Pat. No. 8,022,193), 4′-C(CH₃)(CH₃)—O-2′ and analogs thereof (see, e.g., Seth et al., U.S. Pat. No. 8,278,283), 4′-CH₂—N(OCH₃)-2′ and analogs thereof (see, e.g., Prakash et al., U.S. Pat. No. 8,278,425), 4′-CH₂—O—N(CH₃)-2′ (see, e.g., Allerson et al., U.S. Pat. No. 7,696,345 and Allerson et al., U.S. Pat. No. 8,124,745), 4′-CH₂—C(H)(CH₃)-2′ (see, e.g., Zhou, et al., J. Org. Chem., 2QQ9, 74, 118-134), 4′-CH₂—C(═CH₂)-2′ and analogs thereof (see, e.g., Seth et al., U.S. Pat. No. 8,278,426), 4′-C(RₐR_{b})—N(R)—O-2′, 4′-C(RₐR_{b})—O—N(R)-2′, 4′-CH₂—O—N(R)-2′, and 4′-CH₂—N(R)—O-2′, wherein each R, Rₐ, and R_{b} is, independently, H, a protecting group, or C₁-C₁₂ alkyl (see, e.g. Imanishi et al., U.S. Pat. No. 7,427,672). The entire contents of all of the foregoing references is incorporated by reference herein for all purposes.

[0654] In some embodiments, such 4′ to 2′ bridges independently comprise from 1 to 4 linked groups independently selected from: —[C(Rₐ)(R_{b})]n-, —[C(Rₐ)(R_{b})]n-O—, —C(Rₐ)═C(R_{b})—, —C(Rₐ)═N—, —C(═NRₐ)—, —C(═O)—, —C(═S)—, —O—, —Si(Rₐ)₂—, —S(═O)X—, and —N(Rₐ)—; wherein: x is 0, 1, or 2; n is 1, 2, 3, or 4; each Rₐ and R_{b} is, independently, H, a protecting group, hydroxyl, C₁-C₁₂ alkyl, substituted C₁-C₁₂ alkyl, C₂-C₁₂ alkenyl, substituted C₂-C₁₂ alkenyl, C₂-C₁₂ alkynyl, substituted C₂-C₁₂ alkynyl, C₅-C₂₀ aryl, substituted C₅-C₂₀ aryl, heterocycle radical, substituted heterocycle radical, heteroaryl, substituted heteroaryl, C₅-C₇ alicyclic radical, substituted C₅-C₇ alicyclic radical, halogen, OJ1, NJ1J2, SJ1, N3, COOJ1, acyl (C(═O)—H), substituted acyl, CN, sulfonyl (S(=0)2-J1), or sulfoxyl (S(═O)-J1); and each J1 and J2 is, independently, H, C₁-C₁₂ alkyl, substituted C₁-C₁₂ alkyl, C₂-C₁₂ alkenyl, substituted C₂-C₁₂ alkenyl, C₂-C₁₂ alkynyl, substituted C₂-C₁₂ alkynyl, C₅-C₂₀ aryl, substituted C₅-C₂₀ aryl, acyl (C(═O)—H), substituted acyl, a heterocycle radical, a substituted heterocycle radical, C₁-C₁₂ aminoalkyl, substituted C₁-C₁₂ aminoalkyl, or a protecting group.

[0655] Additional bicyclic sugar moieties are known in the art, see, for example: Freier et al., Nucleic Acids Research, 1997, 25 (22), 4429-4443, Alback et al., J. Org. Chem., 2006, 71, 7731-7740, Singh et al., Chem. Commun., 1998, 4, 455-456; Koshkin et al., Tetrahedron, 1998, 54, 3607-3630; Kumar et al., Bioorg. Med. Chem. Lett., 1998, 8, 2219-2222; Singh et al., J. Org. Chem., 1998, 63, 10035-10039; Srivastava et al., J. Am. Chem. Soc., 2007,129, 8362-8379; Wengel et a., U.S. Pat. No. 7,053,207; Imanishi et al., U.S. Pat. No. 6,268,490; Imanishi et al. U.S. Pat. No. 6,770,748; Imanishi et al., U.S. RE44,779; Wengel et al., U.S. Pat. No. 6,794,499; Wengel et al., U.S. Pat. No. 6,670,461; Wengel et al., U.S. Pat. No. 7,034,133; Wengel et al., U.S. Pat. No. 8,080,644; Wengel et al., U.S. Pat. No. 8,034,909; Wengel et al., U.S. Pat. No. 8,153,365; Wengel et al., U.S. Pat. No. 7,572,582; Ramasamy et al., U.S. Pat. No. 6,525,191; Torsten et al., WO 2004/106356; Wengel et al., WO 1999/014226; Seth et al., WO 2007/134181; Seth et al., U.S. Pat. No. 7,547,684; Seth et al., U.S. Pat. No. 7,666,854; Seth et. al., U.S. Pat. No. 8,088,746; Seth et al., U.S. Pat. No. 7,750,131; Seth et al., U.S. Pat. No. 8,030,467; Seth et al., U.S. Pat. No. 8,268,980; Seth et al., U.S. Pat. No. 8,546,556; Seth et al., U.S. Pat. No. 8,530,640; Migawa et al., U.S. Pat. No. 9,012,421; Seth et al., U.S. Pat. No. 8,501,805; and U.S. Patent Publication Nos. Allerson et al., US2008/0039618 and Migawa et al., US2015/0191727. The entire contents of all of the foregoing references is incorporated by reference herein for all purposes.

[0656] In some embodiments, the modified sugar (e.g., ribose) comprises a constrained ethyl nucleotide comprising a 4′-CH(CH₃)—O-2′ bridge. In some embodiments, the constrained ethyl nucleotide is in the S conformation (S-cEt). In some embodiments, the modified sugar (e.g., ribose) comprises a conformationally restricted nucleotide (CRN). CRNs are nucleotide analogs with a linker connecting the C2′ and C4′ carbons of ribose or the C3 and —C5′ carbons of ribose. Representative publications that teach the preparation of certain of the above include, but are not limited to, US2013/0190383; and WO2013/036868, the entire contents of each of which are hereby incorporated herein by reference.

[0657] In some embodiments, bicyclic sugar moieties and nucleosides incorporating such bicyclic sugar moieties are further defined by isomeric configuration. For example, an LNA nucleoside (described herein) may be in the α-L configuration or in the β-D configuration. Herein, general descriptions of bicyclic nucleosides include both isomeric configurations. Any of the foregoing bicyclic nucleosides can be prepared having one or more stereochemical sugar configurations including for example α-L-ribofuranose and β-D-ribofuranose (see, e.g., WO 99/14226, the entire contents of which are incorporated herein by reference for all purposes).

[0658] Additional representative U.S. patents and U.S. Patent Publications that teach the preparation of bicyclic nucleosides (e.g., locked nucleic acid) include, but are not limited to, the following: U.S. Pat. Nos. 6,268,490; 6,525,191; 6,670,461; 6,770,748; 6,794,499; 6,998,484; 7,053,207; 7,034,133; 7,084,125; 7,399,845; 7,427,672; 7,569,686; 7,741,457; 8,022,193; 8,030,467; 8,278,425; 8,278,426; 8,278,283; US 2008/0039618; and US 2009/0012281, the entire contents of each of which are hereby incorporated herein by reference.

### (ii) Nucleobase Modifications

[0659] In some embodiments, the modified agent (or any component thereof) (e.g., antisense strand, sense strand, dsRNA agent, etc.) comprises one or more nucleotides comprising a modified nucleobase.

[0660] As used herein, “unmodified” nucleobases refer to the purine bases adenine (A) and guanine (G), and the pyrimidine bases thymine (T), cytosine (C), and uracil (U). Modified nucleobases include other synthetic and natural nucleobases.

[0661] Modified nucleobases include, but are not limited to, 5-substituted pyrimidines, 6-azapyrimidines, alkyl or alkynyl substituted pyrimidines, alkyl substituted purines, and N-2, N-6 and 0-6 substituted purines. In certain embodiments, modified nucleobases are selected from: 5-methylcytosine, 2-aminopropyladenine, 5-hydroxymethyl cytosine, xanthine, hypoxanthine, deoxythimidine (dT), 2-aminoadenine, 6-N-methylguanine, 6-N-methyladenine, 2-propyladenine, 2-thiouracil, 2-thiothymine and 2-thiocytosine, 5-propynyl (—C═C—CH₃) uracil, 5-propynylcytosine, 6-azouracil, 6-azocytosine, 6-azothymine, 5-ribosyluracil (pseudouracil), 4-thiouracil, 8-halo, 8-amino, 8-thiol, 8-thioalkyl, 8-hydroxyl, 8-aza and other 8-substituted purines, 5-halo, particularly 5-bromo, 5-trifluoromethyl, 5-halouracil, and 5-halocytosine, 7-methylguanine, 7-methyladenine, 2-F-adenine, 2-aminoadenine, 7-deazaguanine, 7-deazaadenine, 3-deazaguanine, 3-deazaadenine, 6-N-benzoyladenine, 2-N-isobutyrylguanine, 4-N-benzoylcytosine, 4-N-benzoyluracil, 5-methyl 4-Nbenzoylcytosine, 5-methyl 4-N-benzoyluracil, universal bases, hydrophobic bases, promiscuous bases, size-expanded bases, and fluorinated bases. Further modified nucleobases include tricyclic pyrimidines, such as 1,3-diazaphenoxazine-2-one, 1,3-diazaphenothiazine-2-one and 9-(2-aminocthoxy)-1,3-diazaphenoxazine-2-one (G-clamp). Modified nucleobases may also include those in which the purine or pyrimidine base is replaced with other heterocycles, for example 7-deaza-adenine, 7-deazaguanosine, 2-aminopyridine and 2-pyridone. Further nucleobases include those disclosed in Merigan et al., U.S. Pat. No. 3,687,808; The Concise Encyclopedia Of Polymer Science And Engineering, Kroschwitz, J. I., Ed., John Wiley & Sons, 1990, 858-859; Englisch et al., Angewandte Chemie, International Edition, 1991, 30, 613; Sanghvi, Y. S., Chapter 15, Antisense Research and Applications, Crooke, S. T. and Lebleu, B., Eds., CRC Press, 1993, 273-288; and those disclosed in Chapters 6 and 15, Antisense Drug Technology, Crooke S. T., Ed., CRC Press, 2008, 163-166 and 442-443; the entire contents of each of which is incorporated herein by reference for all purposes.

[0662] In some embodiments, the modified nucleobase comprises a pseudouridine, 2′thiouridine (s2U), N6′-methyladenosine, 5′methylcytidine (m⁵C), 5′fluoro-2′deoxyuridine, N-ethylpiperidine 7-EAA triazole modified adenine, N-ethylpiperidine 6′triazole modified adenine, 6-phenylpyrrolo-cytosine (PhpC), 2′,4′-difluorotoluyl ribonucleoside (rF), or 5′nitroindole. In some embodiments, the modified nucleobase comprises a 5-substituted pyrimidine; 6-azapyrimidine; or N-2, N-6 and 0-6 substituted purines (including 2-aminopropyladenine, 5-propynyluracil and 5-propynylcytosine). 5-methylcytosine substitutions have been shown to increase nucleic acid duplex stability by 0.6-1.2° C. (Sanghvi, Y. S., Crooke, S. T. and Lebleu, B., Eds., dsRNA Research and Applications, CRC Press, Boca Raton, 1993, pp. 276-278) and are exemplary base substitutions, even more particularly when combined with 2′-O-methoxyethyl sugar modifications.

[0663] Representative U.S. patents an published applications that teach the preparation of certain of the above noted modified nucleobases as well as other modified nucleobases include, but are not limited to, U.S. Pat. Nos. 3,687,808, 4,845,205; 5,130,30; 5,134,066; 5,175,273; 5,367,066; 5,432,272; 5,457,187; 5,459,255; 5,484,908; 5,502,177; 5,525,711; 5,552,540; 5,587,469; 5,594,121, 5,596,091; 5,614,617; 5,681,941; 5,750,692; 6,015,886; 6,147,200; 6,166,197; 6,222,025; 6,235,887; 6,380,368; 6,528,640; 6,639,062; 6,617,438; 7,045,610; 7,427,672; 7,495,088; 5,130,302; 5,134,066; 5,175,273; 5,367,066; 5,432,272; 5,434,257; 5,457,187; 5,459,255; 5,484,908; 5,502,177; 5,525,711; 5,552,540; U.S. Pat. Nos. 5,587,469; 5,594,121; 5,596,091; 5,614,617; 5,645,985; 5,681,941; 5,811,534; 5,750,692; 5,948,903; 5,587,470; 5,457,191; 5,763,588; 5,830,653; 5,808,027; 6,166,199; and 6,005,096, the entire contents of each of which is hereby incorporated herein by reference for all purposes. Exemplary nucleobase modifications are further provided in Hu, B., Zhong, L., Weng, Y. et al. Therapeutic siRNA: state of the art. Sig Transduct Target Ther 5, 101 (2020). https://doi.org/10.1038/s41392-020-0207-x (e.g., Table 2), the entire contents of each of which is incorporated by reference herein for all purposes.

### 4.3.1.2 Internucleoside Linkage Modifications

[0664] In some embodiments, the modified agent (or any component thereof) (e.g., antisense strand, sense strand, dsRNA agent, etc.) comprises one or more modified internucleoside linkage. Modified internucleoside linkages, compared to naturally occurring phosphate linkages, can be used to alter, typically increase, nuclease resistance of an agent (e.g., described herein).

[0665] The naturally occurring internucleoside linkage of RNA and DNA is a 3′ to 5′ phosphodiester linkage. In some embodiments, the modified internucleoside linkage contains a normal 3′-5′ linkage. In some embodiments, the modified internucleoside linkage contains a 2′-5′ linkage. In some embodiments, the modified internucleoside linkage has an inverted polarity wherein the adjacent pairs of nucleoside units are linked e.g., 3′-5′ to 5′-3′ or 2′-5′ to 5′-2′.

[0666] The two main classes of modified internucleoside linking can be defined by the presence or absence of a phosphorous atom.

[0667] Exemplary internucleoside linkage modifications are further provided in Hu, B., Zhong, L., Weng, Y. et al. Therapeutic siRNA: state of the art. Sig Transduct Target Ther 5, 101 (2020). https://doi.org/10.1038/s41392-020-0207-x (e.g., Table 2), the entire contents of each of which is incorporated by reference herein for all purposes.

### (i) Modified Phosphorous Containing Internucleoside Linkages

[0668] In some embodiments, the modified internucleoside linkage comprises a phosphorous atom. Representative modified phosphorus-containing internucleoside linkages include but are not limited to phosphorothioates (PS (Rp isomer or Sp isomer)) (e.g., 5′phosphorothioate), phosphotriesters, phosphoramidates (e.g., 3′-amino phosphoramidate and aminoalkylphosphoramidates), chiral phosphorothioates, phosphorodithioates (PS2), aminoalkylphosphotriesters, methyl and other alkyl phosphonates (e.g., methylphosphonate (MP), 3′-alkylene phosphonates), methpxypropyl-phosphonates (MOP), vinyl-phosphonate, 5′-(E)-vinylphosphonates, 5′methyl phosphonates, (S)-5′C-methyl with phosphates, phosphinates, thionophosphoramidates, thionoalkylphosphonates, thionoalkylphosphotriesters, boranophosphates, and peptide nucleic acids (PNAs).

[0669] In some embodiments, the modified internucleotide linkage comprises a vinyl-phosphonate. In some embodiments, the modified internucleotide linkage comprises a vinyl-phosphonate-2′-O-methyl (e.g., a vinyl-phosphonate-2′-O-methyluridine).

[0670] Methods of preparing polynucleotides containing one or more modified phosphorus-containing internucleoside linkage are known in the art. See, e.g., U.S. Pat. Nos. 3,687,808; 4,469,863; 4,476,301; 5,023,243; 5,177,195; 5,188,897; 5,264,423; 5,276,019; 5,278,302; 5,286,717; 5,321,131; 5,399,676; 5,405,939; 5,453,496; 5,455,233; 5,466,677; 5,476,925; 5,519,126; 5,536,821; 5,541,316; 5,550,111; 5,563,253; 5,571,799; 5,587,361; 5,625,050; 6,028,188; 6,124,445; 6,160,109; 6,169,170; 6,172,209; 6,239,265; 6,277,603; 6,326,199; 6,346,614; 6,444,423; 6,531,590; 6,534,639; 6,608,035; 6,683,167; 6,858,715; 6,867,294; 6,878,805; 7,015,315; 7,041,816; 7,273,933; 7,321,029; and U.S. Pat. RE39464, the entire contents of each of which are hereby incorporated herein by reference for all purposes. Exemplary modifications are further provided in Hu, B., Zhong, L., Weng, Y. et al. Therapeutic siRNA: state of the art. Sig Transduct Target Ther 5, 101 (2020). https://doi.org/10.1038/s41392-020-0207-x (e.g., Table 2), the entire contents of each of which is incorporated by reference herein for all purposes.

### (ii) Modified Non-Phosphorous Containing Internucleoside Linkages

[0671] In some embodiments, the modified internucleoside linkage does not contain a phosphorous atom. Modified internucleoside linkages that do not include a phosphorus atom therein have backbones that are formed by short chain alkyl or cycloalkyl internucleoside linkages, mixed heteroatoms and alkyl or cycloalkyl internucleoside linkages, or one or more short chain heteroatomic or heterocyclic internucleoside linkages. These include those having morpholino linkages (formed in part from the sugar portion of a nucleoside); siloxane backbones; sulfide, sulfoxide and sulfone backbones; formacetyl and thioformacetyl backbones; methylene formacetyl and thioformacetyl backbones; alkene containing backbones; sulfamate backbones; methyleneimino and methylenehydrazino backbones; sulfonate and sulfonamide backbones; amide backbones; and others having mixed N, O, S, and CH₂ component parts.

[0672] Representative non-phosphorous containing internucleoside linking groups include but are not limited to methylenemethylimino (—CH₂—N(CH₃)—O—CH₂—), thiodiester, thionocarbamate (—O—C(═O) (NH)—S—); siloxane (—O—SiH₂—O—); and N,N′-dimethylhydrazine (—CH₂—N(CH₃)—N(CH₃)—).

[0673] Methods of preparing polynucleotides comprising modified internucleoside linkages do not contain a phosphorous atom are known in the art. See, e.g., U.S. Pat. Nos. 5,034,506; 5,166,315; 5,185,444; 5,214,134; 5,216,141; 5,235,033; 5,64,562; 5,264,564; 5,405,938; 5,434,257; 5,466,677; 5,470,967; 5,489,677; 5,541,307; 5,561,225; 5,596,086; 5,602,240; 5,608,046; 5,610,289; 5,618,704; 5,623,070; 5,663,312; 5,633,360; 5,677,437; and 5,677,439, the entire contents of each of which are hereby incorporated herein by reference.

### 4.3.1.3 Additional Exemplary Nucleotide Modifications

[0674] In some embodiments, the modified agent comprises one or more RNA mimetic in which both the sugar and the internucleoside linkage of the nucleotide units are replaced with novel groups. The nucleobase units are maintained for hybridization with an appropriate nucleic acid target (e.g., a target mRNA). In some embodiments, the RNA mimetic is a peptide nucleic acid (PNA). In PNAs, the ribose moiety of the RNA nucleotide is replaced with an amide containing moiety (e.g., an aminoethylglycine). The nucleobases are retained and are bound directly or indirectly to aza nitrogen atoms of the amide. Representative US patents that teach the preparation of PNA compounds include, but are not limited to, U.S. Pat. Nos. 5,539,082; 5,714,331; and 5,719,262, the entire contents of each of which are hereby incorporated herein by reference. Additional PNA compounds suitable for use in the agents described herein are described in, for example, in Nielsen et al., Science, 1991, 254, 1497-1500, the entire contents of which is incorporated by reference herein for all purposes.

[0675] Potentially stabilizing modifications to the terminal ends of the agents (e.g., described herein) can also be incorporated to agents described herein. For example, N-(acetylaminocaproyl)-4-hydroxyprolinol (Hyp-C6-NHAc), N-(caproyl-4-hydroxyprolinol (Hyp-C6), N-(acetyl-4-hydroxyprolinol (Hyp-NHAc), thymidine-2′-O-deoxythymidine (ether), N-(aminocaproyl)-4-hydroxyprolinol (Hyp-C6-amino), 2-docosanoyl-uridine-3″-phosphate, inverted base dT (idT) and others. Such modifications are known in the art. See, e.g., WO2011/005861, the entire contents of which is incorporated herein by reference.

### 4.3.2 Extent of Modified Nucleotides

[0676] In some embodiments, at least 5%, 10%, 15%, 20%, 25%, 30%, 35%, 40%, 45%, 50%, 55%, 60%, 65%, 70%, 75%, 80%, 85%, 90%, 95%, or 100% of the nucleotides of the agent (or any component (e.g., nucleic acid molecule) thereof) (e.g., described herein, e.g., an antisense strand, a sense strand, a dsRNA agent, RNAi agent) are modified. In some embodiments, about 25%, 30%, 35%, 40%, 45%, 50%, 55%, 60%, 65%, 70%, 75%, 80%, 85%, 90%, 95%, or 100% of the nucleotides of the agent (or any component (e.g., nucleic acid molecule) thereof) (e.g., described herein, e.g., an antisense strand, a sense strand, a dsRNA agent, RNAi agent, etc.) are modified. In some embodiments, 100% of the nucleotides of the agent (or any component (e.g., nucleic acid molecule) thereof) (e.g., described herein, e.g., an antisense strand, a sense strand, a dsRNA agent, RNAi agent, etc.) are modified. In some embodiments, at least 1, 2, 3, 4, 5, 6, 7, 8, 9, 10, 11, 12, 13, 14, 15, 16, 17, 18, 19, 20, 21, 22, 23, 24, 25, 26, 27, 28, 29 or 30 of the nucleotides of the agent (or any component (e.g., nucleic acid molecule) thereof) (e.g., described herein, e.g., an antisense strand, a sense strand, a dsRNA agent, RNAi agent, etc.) are modified. In some embodiments, substantially all of the nucleotides of the agent (or any component (e.g., nucleic acid molecule) thereof) (e.g., described herein, e.g., an antisense strand, a sense strand, a dsRNA agent, RNAi agent, etc.) are modified. In specific embodiments, all of the nucleotides of the agent (or any component (e.g., nucleic acid molecule) thereof) (e.g., described herein, e.g., an antisense strand, a sense strand, a dsRNA agent, RNAi agent, etc.) are modified.

[0677] In some embodiments, at least 25%, 30%, 35%, 40%, 45%, 50%, 55%, 60%, 65%, 70%, 75%, 80%, 85%, 90%, 95%, or 100% of the nucleotides of the sense and/or antisense strand are modified. For example, at least 50% of the nucleotides of the sense strand and/or antisense strand may be modified. For example, at least 55% of the nucleotides of the sense strand and/or antisense strand may be modified. For example, at least 60% of the nucleotides of the sense strand and/or antisense strand may be modified. For example, at least 65% of the nucleotides of the sense strand and/or antisense strand may be modified. For example, at least 70% of the nucleotides of the sense strand and/or antisense strand may be modified. For example, at least 75% of the nucleotides of the sense strand and/or antisense strand may be modified. For example, at least 80% of the nucleotides of the sense strand and/or antisense strand may be modified. For example, at least 85% of the nucleotides of the sense strand and/or antisense strand may be modified. For example, at least 90% of the nucleotides of the sense strand and/or antisense strand may be modified. For example, at least 90% of the nucleotides of the sense strand and/or antisense strand may be modified. For example, at least 95% of the nucleotides of the sense strand and/or antisense strand may be modified. In some embodiments, substantially all (or all) of the nucleotides in the sense strand and/or antisense strand are modified.

[0678] In some embodiments, substantially all (or all) of the nucleotides in the sense strand are modified. In some embodiments, substantially all (or all) of the nucleotides in the antisense strand are modified. In some embodiments, substantially all (or all) of the nucleotides in the sense strand and antisense strand are modified.

[0679] In some embodiments, at least one of the modified nucleotides comprises a modified sugar (e.g., ribose moiety). In some embodiments, at least one of the modified nucleotides comprises a modified nucleobase. In some embodiments, the sense strand comprises at least one modified internucleoside linkage and/or the antisense strand comprises at least one modified internucleoside linkage.

[0680] In some embodiments, not more than 30, 29, 28, 27, 26, 25, 24, 23, 22, 21, 20, 19, 18, 17, 16, 15, 14, 13, 12, 11, 10, 9, 8, 7, 6, 5, 4, 3, 2, or 1 of the nucleotides of the of the agent (or any component (e.g., nucleic acid molecule) thereof) (e.g., described herein, e.g., an antisense strand, a sense strand, a dsRNA agent, RNAi agent, etc.) are unmodified. In some embodiments, not more than 10, 9, 8, 7, 6, 5, 4, 3, 2, or 1 of the nucleotides of the agent (or any component (e.g., nucleic acid molecule) thereof) (e.g., described herein, e.g., an antisense strand, a sense strand, a dsRNA agent, RNAi agent, etc.) are unmodified. In some embodiments, not more than 25%, 30%, 35%, 40%, 45%, 50%, 55%, 60%, 65%, 70%, 75%, 80%, 85%, 90%, 95%, or 100% of the nucleotides of the agent (or any component (e.g., nucleic acid molecule) thereof) (e.g., described herein, e.g., an antisense strand, a sense strand, a dsRNA agent, RNAi agent, etc.) are unmodified.

[0681] In some embodiments, at least 5%, 10%, 15%, 20%, 25%, 30%, 35%, 40%, 45%, 50%, 55%, 60%, 65%, 70%, 75%, 80%, 85%, 90%, 95%, or 100% of the nucleotides of the agent (or any component (e.g., nucleic acid molecule) thereof) (e.g., described herein, e.g., an antisense strand, a sense strand, a dsRNA agent, RNAi agent) are unmodified. In some embodiments, about 25%, 30%, 35%, 40%, 45%, 50%, 55%, 60%, 65%, 70%, 75%, 80%, 85%, 90%, 95%, or 100% of the nucleotides of the agent (or any component (e.g., nucleic acid molecule) thereof) (e.g., described herein, e.g., an antisense strand, a sense strand, a dsRNA agent, RNAi agent, etc.) are unmodified. In some embodiments, at least 1, 2, 3, 4, 5, 6, 7, 8, 9, 10, 11, 12, 13, 14, 15, 16, 17, 18, 19, 20, 21, 22, 23, 24, 25, 26, 27, 28, 29 or 30 of the nucleotides of the agent (or any component (e.g., nucleic acid molecule) thereof) (e.g., described herein, e.g., an antisense strand, a sense strand, a dsRNA agent, RNAi agent, etc.) are unmodified. In some embodiments, substantially all of the nucleotides of the agent (or any component (e.g., nucleic acid molecule) thereof) (e.g., described herein, e.g., an antisense strand, a sense strand, a dsRNA agent, RNAi agent, etc.) are unmodified. In some embodiments, all of the nucleotides of the agent (or any component (e.g., nucleic acid molecule) thereof) (e.g., described herein, e.g., an antisense strand, a sense strand, a dsRNA agent, RNAi agent, etc.) are unmodified.

[0682] In some embodiments, not more than 30, 29, 28, 27, 26, 25, 24, 23, 22, 21, 20, 19, 18, 17, 16, 15, 14, 13, 12, 11, 10, 9, 8, 7, 6, 5, 4, 3, 2, or 1 of the nucleotides of the of the agent (or any component (e.g., nucleic acid molecule) thereof) (e.g., described herein, e.g., an antisense strand, a sense strand, a dsRNA agent, RNAi agent, etc.) are modified. In some embodiments, not more than 10, 9, 8, 7, 6, 5, 4, 3, 2, or 1 of the nucleotides of the agent (or any component (e.g., nucleic acid molecule) thereof) (e.g., described herein, e.g., an antisense strand, a sense strand, a dsRNA agent, RNAi agent, etc.) are modified. In some embodiments, not more than 25%, 30%, 35%, 40%, 45%, 50%, 55%, 60%, 65%, 70%, 75%, 80%, 85%, 90%, 95%, or 100% of the nucleotides of the agent (or any component (e.g., nucleic acid molecule) thereof) (e.g., described herein, e.g., an antisense strand, a sense strand, a dsRNA agent, RNAi agent, etc.) are modified.

[0683] In some embodiments, the RNAi agent (e.g., antisense strand, sense strand, dsRNA agent (e.g., described herein)) comprises one or more non-naturally internucleoside linkage. In some embodiments, at least 25%, 30%, 35%, 40%, 45%, 50%, 55%, 60%, 65%, 70%, 75%, 80%, 85%, 90%, 95%, or 100% of the internucleoside linkages of the RNAi agent (e.g., antisense strand, sense strand, dsRNA agent (e.g., described herein)) are non-naturally occurring. In some embodiments, at least 25%, 30%, 35%, 40%, 45%, 50%, 55%, 60%, 65%, 70%, 75%, 80%, 85%, 90%, 95%, or 100% of the or internucleoside linkages of the RNAi agent (e.g., antisense strand, sense strand, dsRNA agent (e.g., described herein)) are chemically modified.

### 4.4 Conjugates

[0684] In some embodiments, the agent (e.g., described herein) (e.g., RNAi agent, dsRNA agent, antisense strand, sense strand) comprises a heterologous moiety (e.g., operably connected to the agent). Therefore, further provided herein are conjugates comprising an agent (e.g., described herein) (e.g., RNAi agent, dsRNA agent, antisense strand, sense strand) and a heterologous moiety (e.g., operably connected to the agent). It is clear from the disclosure, but for the sake of clarity, the conjugate an comprise a modified agent (e.g., described herein, see, e.g., § 4.3).

[0685] In some embodiments, the heterologous moiety modifies one or more property of the agent (e.g., described herein) (e.g., RNAi agent, dsRNA agent, antisense strand, sense strand) to which it is conjugated. Exemplary properties include, but are not limited to, pharmacodynamics, pharmacokinetics, stability, absorption, activity, tissue distribution, cellular distribution, cellular uptake, charge, half-life, clearance, and binding affinity to a target nucleic acid molecule (e.g., a target mRNA).

[0686] In some embodiments, the heterologous moiety enhances the distribution and/or uptake (e.g., into a cell, e.g., into a cell in a subject) of the agent (e.g., described herein) (e.g., RNAi agent, dsRNA agent, antisense strand, sense strand) (e.g., as compared to an agent that lacks the heterologous moiety). In some embodiments, the heterologous moiety alters (e.g., extends) the lifetime (e.g., in vivo) of the agent (e.g., described herein) (e.g., RNAi agent, dsRNA agent, antisense strand, sense strand) (e.g., as compared to an agent that lacks the heterologous moiety). In some embodiments, the heterologous moiety provides an enhanced affinity for a selected target, e.g., a selected molecule, cell type, compartment (e.g., cell type, tissue, organ or region of the body) (e.g., as compared to an agent that lacks the heterologous moiety).

[0687] In some embodiments, the heterologous moiety enhances the activity (e.g., in a cell, e.g., in a cell in a subject) of the agent (e.g., described herein) (e.g., RNAi agent, dsRNA agent, antisense strand, sense strand) (e.g., as compared to an agent that lacks the heterologous moiety). Activity can include, e.g., degradation of a target mRNA (e.g., a CIDEB mRNA), inhibition of expression of a target gene (e.g., a CIDEB gene), and/or reduction in the expression of a target gene (e.g., a CIDEB gene).

[0688] In some embodiments, the heterologous moiety imparts a new property on the agent (e.g., described herein) (e.g., RNAi agent, dsRNA agent, antisense strand, sense strand) to which it is conjugated. For example, fluorophores or reporter groups that enable detection of the agent (e.g., described herein) (e.g., RNAi agent, dsRNA agent, antisense strand, sense strand).

[0689] It is to be understood the heterologous moieties can impart multiple (e.g., any combination of the foregoing) properties of the agent (e.g., described herein) (e.g., RNAi agent, dsRNA agent, antisense strand, sense strand).

[0690] In some embodiments, wherein the agent is a dsRNA agent comprising a double stranded region, the heterologous moiety does not take part in, does not alter, and/or does not interfere with, the creation of a double strand region.

### 4.4.1 Heterologous Moieties

[0691] Heterologous moieties, include for example, but are not limited to, carbohydrates, peptides, proteins (e.g., antibodies or functional fragments or variants thereof; ligands (e.g., of a target receptor)), lipids, polymers, small molecules, intercalators, reporter molecules, polyamines, polyamides, vitamin moictics, polyethylene glycols, thioethers, polyethers, cholesterols, thiocholesterols, cholic acid moieties, folate, lipophilic groups, phospholipids, biotin, phenazine, phenanthridine, anthraquinone, adamantane, acridine, fluoresceins, rhodamines, coumarins, fluorophores, and dyes.

[0692] In some embodiments, the heterologous moiety is a carbohydrate, peptide, protein (e.g., antibody or functional fragment or variant thereof, e.g., ligand (e.g., of a target receptor)), lipid, polymer, small molecule, or any combination thereof. In some embodiments, the heterologous moiety comprises an active drug substance. In some embodiments, the heterologous moiety does not contain an active drug substance.

[0693] Exemplary heterologous moieties (e.g., targeting moieties), further include but are not limited, to carbohydrate moities (e.g., GalNAc and GalNAc derivatives (See, e.g., U.S. Pat. No. 8,106,022 and WO2019055633)); lipid moieties such as a cholesterol moiety (see, e.g., Letsinger et al., Proc. Natl. Acid. Sci. USA, 1989, 86:6553-6556); cholic acid (see, e.g., Manoharan et al., Biorg. Med. Chem. Let., 1994, 4:1053-1060), a thioether, e.g., beryl-S-tritylthiol (see, e.g., Manoharan et al., Ann. N.Y. Acad. Sci., 1992, 660:306-309; Manoharan et al., Biorg. Med. Chem. Let., 1993, 3:2765-2770); thiocholesterols (see, e.g., Oberhauser et al., Nucl. Acids Res., 1992, 20:533-538); aliphatic chains (e.g., dodecandiol or undecyl residues) (see, e.g., Saison-Behmoaras et al., EMBO J, 1991, 10:1111-1118; Kabanov et al., FEBS Lett., 1990, 259:327-330; Svinarchuk et al., Biochimie, 1993, 75:49-54), phospholipids (e.g., dihexadecyl-rac-glycerol or triethyl-ammonium 1,2-di-O-hexadecyl-rac-glycero-3-phosphonate) (see, e.g., Manoharan et al., Tetrahedron Lett., 1995, 36:3651-3654; Shea et al., Nucl. Acids Res., 1990, 18:3777-3783); polyamine or polyethylene glycol chains (see, e.g., Manoharan et al., Nucleosides & Nucleotides, 1995, 14:969-973); adamantane acetic acids (see, e.g., Manoharan et al., Tetrahedron Lett., 1995, 36:3651-3654); palmityl moieties (see, e.g., Mishra et al., Biochim. Biophys. Acta, 1995, 1264:229-237); and octadecylamine or hexylamino-carbonyloxycholesterol moiety (see, e.g., Crooke et al., J. Pharmacol. Exp. Ther., 1996, 277:923-937). The entire contents of each of the foregoing references is incorporated herein by reference for all purposes. Additional carbohydrate heterologous moieties (and linkers) suitable for use in conjugates described herein include those described in PCT Publication Nos. WO 2014/179620 and WO 2014/179627, the entire contents of each of which are incorporated herein by reference for all purposes.

### 4.4.1.1 Targeting Moieties

[0694] In some embodiments, the heterologous moiety is a targeting moiety. In some embodiments, the targeting moiety enhances distribution of the agent (e.g., described herein) (e.g., RNAi agent, dsRNA agent, antisense strand, sense strand) to a target cell (or population of cells), tissue, and/or organ (e.g., as compared to an agent that lacks the targeting moiety). In some embodiments, the targeting moiety enhances the uptake of the agent (e.g., described herein) (e.g., RNAi agent, dsRNA agent, antisense strand, sense strand) into a target cell (or population of cells) (e.g., as compared to an agent that lacks the targeting moiety). In some embodiments, the targeting moiety provides enhanced affinity for a selected target, e.g., molecule, cell, cell type, compartment, e.g., a cellular or organ compartment, tissue, organ or region of the body, (e.g., as compared to an agent that lacks the targeting moiety).

[0695] In some embodiments, the targeting moiety specifically binds to a target molecule (e.g., protein, carbohydrate, lipid, etc.) expressed on the surface of a target cell, tissue, and/or organ. In some embodiments, the target molecule is a protein, carbohydrate, or lipid. In some embodiments, the target molecule is a receptor.

### (i) Hepatocyte Targeting Moieties

[0696] In some embodiments, the targeting moiety specifically binds to a target molecule (e.g., protein, carbohydrate, lipid, etc.) expressed by hepatocytes (e.g., on the surface of the surface of hepatocytes). In some embodiments, the targeting moiety specifically binds to a target molecule protein (e.g., receptor) expressed on the surface of hepatocytes.

[0697] In some embodiments, the targeting moiety comprises a carbohydrate. Exemplary carbohydrate targeting moieties are described in WO2019055633, the entire contents of which is incorporated by reference herein for all purposes. In some embodiments, the carbohydrate is a monosaccharide. In some embodiments, the carbohydrate is a polysaccharide.

[0698] In some embodiments, the targeting moiety comprises at least one (e.g., at least 2, 3, 4, or more) N-acetylgalactosamine (GalNAc) or GalNAc derivative. In some embodiments, the targeting moiety comprise a plurality (e.g., 2, 3, 4, 5, or 6) of GalNAc moieties and/or GalNAc derivatives. In some embodiments, the targeting moiety comprise a plurality (e.g., 2, 3, 4, 5, or 6) of GalNAc moieties and/or GalNAc derivatives each independently attached to a plurality of nucleotides of the agent (e.g., described herein) (e.g., RNAi agent, dsRNA agent, antisense strand, sense strand) through a plurality of linkers (e.g., monovalent linkers). In some embodiments, the GalNAc targeting moiety serves to target the agent to hepatocytes through specific binding to the asialoglycoprotein receptor.

[0699] Exemplary GalNAc conjugates, which comprise one or more GalNAc and/or derivative thereof, are known the art. See, e.g., in U.S. Pat. No. 8,106,022, the entire contents of which is hereby incorporated herein by reference for all purposes. Additional exemplary GalNAc targeting moieties are described below.

[0700] In some embodiments, the targeting moiety (e.g., GalNAc targeting moiety) comprises any one of the following formulas:

[chemical structure]

[chemical structure]

[chemical structure]

[chemical structure]

[chemical structure]

[chemical structure]

[chemical structure]

[chemical structure]

[chemical structure]

[chemical structure]

[chemical structure]

[chemical structure]

[chemical structure]

[0701] In one embodiment, the targeting moiety comprises the GalNAc targeting moiety and linker set forth below in any one of Formulas I.

[0702] In one embodiment, the targeting moiety comprises the GalNAc targeting moiety set forth in Formula I. In one embodiment, the targeting moiety comprises the GalNAc targeting moiety and linker set forth below in Formula II.

[0703] In specific embodiments, the targeting moiety comprises the GalNAc targeting moiety set forth in Formula XXXVI. In specific embodiments, the targeting moiety comprises the GalNAc targeting moiety set forth in Formula XXXVII. In specific embodiments, the targeting moiety comprises the GalNAc targeting moiety set forth in Formula XXXVIII.

[0704] In specific embodiments, the targeting moiety comprises the GalNAc targeting moiety set forth in Formula XXXIX. In specific embodiments, the targeting moiety comprises the GalNAc targeting moiety set forth in Formula XL.

[0705] In specific preferred embodiments, the targeting moiety comprises the GalNAc targeting moiety set forth in Formula XXXIX, wherein the dsRNA agent is operably connected to the targeting moiety via the 3′ end of the sense strand. In specific embodiments, the targeting moiety comprises the GalNAc targeting moiety set forth in Formula XXXIX, wherein the dsRNA agent is operably connected to the targeting moiety via the 5′ end of the sense strand.

[0706] In some embodiments, the targeting moiety comprises the GalNAc targeting moiety set forth in Formula XXXIX, wherein the dsRNA agent is operably connected to the targeting moiety via the 3′ end of the antisense strand. In some embodiments, the targeting moiety comprises the GalNAc targeting moiety set forth in Formula XXXIX, wherein the dsRNA agent is operably connected to the targeting moiety via the 5′ end of the antisense strand.

[0707] In one embodiment, the targeting moiety comprises N-[tris(GalNAc)-amido-dodecanoyl)]-4-hydroxyprolinol [Hyp-(GalNAc-alkyl)3]. In one embodiment, the targeting moiety comprises (2S,4R)-1-[29-[[2-(acetylamino)-2-deoxy-β-D-galactopyranosyl]oxy]-14,14-bis[[3-[[3-[[5-[[2-(acetylamino)-2-deoxy-β-D-galactopyranosyl]oxy]-1-oxopentyl]amino]propyl]amino]-3-oxopropoxy]methyl]-1,12,19,25-tetraoxo-16-oxa-13,20,24-triazanonacos-1-yl]-4-hydroxy-2-hydroxymethylpyrrolidine.

### 4.4.2 Linkers

[0708] In some embodiments, the agent (e.g., described herein) (e.g., RNAi agent, dsRNA agent, antisense strand, sense strand) is directly attached to the heterologous moiety (e.g., targeting moiety) (e.g., directly attached through a single chemical bond). In some embodiments, the agent (e.g., described herein) (e.g., RNAi agent, dsRNA agent, antisense strand, sense strand) is indirectly attached to the heterologous moiety (e.g., targeting moiety). In some embodiments, the agent (e.g., described herein) (e.g., RNAi agent, dsRNA agent, antisense strand, sense strand) is indirectly attached to the heterologous moiety via a linker.

[0709] Suitable linkers for use in the conjugates described herein are known in the art and can be evaluated by a person of ordinary skill in the art using standard methods. Exemplary linkers and components thereof for use in the conjugates described herein are also described below.

[0710] Linkers typically comprise a direct bond or an atom such as oxygen or sulfur, a unit such as NR8, C(O), C(O)NH, SO, SO2, SO2NH or a chain of atoms, such as, but not limited to, substituted or unsubstituted alkyl, substituted or unsubstituted alkenyl, substituted or unsubstituted alkynyl, arylalkyl, arylalkenyl, arylalkynyl, heteroarylalkyl, heteroarylalkenyl, heteroarylalkynyl, heterocyclylalkyl, heterocyclylalkenyl, heterocyclylalkynyl, aryl, heteroaryl, heterocyclyl, cycloalkyl, cycloalkenyl, alkylarylalkyl, alkylarylalkenyl, alkylarylalkynyl, alkenylarylalkyl, alkenylarylalkenyl, alkenylarylalkynyl, alkynylarylalkyl, alkynylarylalkenyl, alkynylarylalkynyl, alkylheteroarylalkyl, alkylheteroarylalkenyl, alkylheteroarylalkynyl, alkenylheteroarylalkyl, alkenylheteroarylalkenyl, alkenylheteroarylalkynyl, alkynylheteroarylalkyl, alkynylheteroarylalkynyl, alkynylheteroarylalkenyl, alkylheterocyclylalkyl, alkylhererocyclylalkynyl, alkylheterocyclylalkenyl, alkenylheterocyclylalkyl, alkenylheterocyclylalkenyl, alkenylheterocyclylalkynyl, alkynylheterocyclylalkyl, alkynylheterocyclylalkenyl, alkynylheterocyclylalkynyl, alkylaryl, alkenylaryl, alkynylaryl, alkylheteroaryl, alkenylheteroaryl, alkynylhereroaryl, which one or more methylenes can be interrupted or terminated by O, S, S(O), SO₂, N(R8), C(O), substituted or unsubstituted aryl, substituted or unsubstituted heteroaryl, or substituted or unsubstituted heterocyclic; where R8 is hydrogen, acyl, aliphatic, or substituted aliphatic. In one embodiment, the linker is about 1-24 atoms, 2-24, 3-24, 4-24, 5-24, 6-24, 6-18, 7-18, 8-18, 7-17, 8-17, 6-16, 7-17, or 8-16 atoms.

[0711] In some embodiments, the linker comprises ethylene glycol (e.g., triethylene glycol), nucleosides, or amino acid units. In some embodiments, the linker comprises one or more groups selected from alkyl, amino, oxo, amide, disulfide, polyethylene glycol, ether, thioether, and hydroxylamino. In some embodiments, the linker comprises groups selected from alkyl, amino, oxo, amide and ether groups. In some embodiments, the linker comprises groups selected from alkyl and amide groups. In some embodiments, the linker comprises groups selected from alkyl and other groups. In some embodiments, the linker comprises at least one phosphorus moiety. In some embodiments, the linker comprises at least one phosphate group. In some embodiments, the linker comprises at least one neutral linking group. Exemplary linkers include but are not limited to triethylene glycol (TEG), pyrrolidine, 8-amino-3,6-dioxaoctanoic acid (ADO), succinimidyl 4-(N-maleimidomethyl) cyclohexane-1-carboxylate (SMCC), 6-aminohexanoic acid (AHEX or AHA). Additional exemplary linkers include but are not limited to substituted or unsubstituted Ci-Cw alkyl, substituted or unsubstituted C2-C10 alkenyl or substituted or unsubstituted C2-C10 alkynyl, wherein a nonlimiting list of preferred substituent groups includes hydroxyl, amino, alkoxy, carboxy, benzyl, phenyl, nitro, thiol, thioalkoxy, halogen, alkyl, aryl, alkenyl and alkynyl.

[0712] In some embodiments, the linker is bifunctional. In general, a bifunctional linker comprises at least two functional groups. One of the functional groups is selected to react with a particular site on an agent (e.g., described herein) and the other is selected to react with a heterologous moiety (e.g., described herein). Examples of functional groups used in a bifunctional linkers include but are not limited to electrophiles for reacting with nucleophilic groups and nucleophiles for reacting with electrophilic groups. In some embodiments, bifunctional linking moieties comprise one or more groups selected from amino, hydroxyl, carboxylic acid, thiol, alkyl, alkenyl, and alkynyl.

[0713] In some embodiments, the linker is a monovalent linker, a bivalent linker, a trivalent linker, or a tetravalent linker. In some embodiments, the linker comprises or consists of the linker set forth above in Formula I.

[0714] In specific embodiments, the linker comprises triethylene glycol (TEG). In specific embodiments, the linker consists of triethylene glycol (TEG). In specific embodiments, the linker is triethylene glycol (TEG).

### 4.4.2.1 Cleavable Linkers

[0715] In some embodiments, the linker is non-cleavable. In some embodiments, the linker is cleavable. Cleavable linkers contain at least one (or a plurality of) cleavable bonds that are susceptible to one or more cleavage agent. Exemplary classes of cleavable linkers include, but are not limited to, redox cleavable linkers, phosphate based cleavable linkers, acid cleavable linkers, ester-based cleavable linkers, and peptide-based cleavable linkers. In certain embodiments, a cleavable bond is selected from among: an amide, an ester, an ether, one or both esters of a phosphodiester, a phosphate ester, a carbamate, or a disulfide.

[0716] Cleavable linkers may be advantageous when a stable conjugate is desired under a first set of conditions but under a second set of conditions it is advantageous to release the agent (e.g., described herein) from the heterologous moiety (e.g., described herein). For example, in some embodiments, it may be desirable to have a sufficiently stable conjugate outside of a cell (e.g., within a subject (e.g., within the blood or serum of a subject)), and upon entry into a cell (e.g., a target cell (e.g., a target cell within a subject)) have the linker cleaved to release the agent (e.g., described herein) from the heterologous moiety (e.g., described herein). In some embodiments, the linker is not cleaved (or is cleaved at a lower rate) under a first condition relative to under a second condition. In some embodiments, the first condition is within the blood (e.g., of a subject) (or in an in vitro system sufficient to mimic the conditions of the blood within a subject) and the second condition is with a cell (e.g., a cell within a subject) (or in an in vitro system sufficient to mimic the conditions of a cell within a subject).

[0717] The suitability of a cleavable linker can be assessed by standard methods known in the art. In general, the suitability of a cleavable linker can be evaluated by testing the ability of a cleavage agent (or condition) to cleave the candidate linker (e.g., the cleavage bond(s)). In some embodiments, it may be desirable to further test the ability of the linker to resist cleavage under a certain condition (e.g., within the blood or serum of subject, when in contact with a non-target cell, tissue, organ).

[0718] In some embodiments, the linker is a redox cleavable linker that is cleaved upon reduction or oxidation. An example of a reductively cleavable linker is a disulphide (—S—S—) containing linker. Redox cleavable linkers can be evaluated using methods analogous to those described above.

[0719] In some embodiments, the linker is a phosphate-based cleavable linker. A phosphate-based cleavable linker is cleaved by agents that degrade or hydrolyze the phosphate group. For example, in cells, enzymes such as phosphatases are capable of cleaving phosphate groups. Examples of phosphate-based linkers include those comprising any of the following —O—P(O)(ORk)-O—, —OP(S)(ORk)-O—, —O—P(S)(SRk)-O—, —S—P(O)(ORk)-O—, —O—P(O)(ORk)-S—, —S—P(O)(ORk)-S—, —OP(S)(ORk)-S—, —S—P(S)(ORk)-O—, —O—P(O)(Rk)-O—, —O—P(S)(Rk)-O—, —S—P(O)(Rk)-O—, —S—P(S)(Rk)-O—, —S—P(O)(Rk)-S—, —O—P(S)(Rk)-S—, wherein Rk at each occurrence can be, independently, C1-C20 alkyl, C1-C20 haloalkyl, C6-C10 aryl, or C7-C12 aralkyl. Exemplary embodiments include are —OP(O)(OH)—O—, —O—P(S)(OH)—O—, —O—P(S)(SH)—O—, —S—P(O)(OH)—O—, —O—P(O)(OH)—S—, —S—P(O)(OH)—S—, —O—P(S)(OH)—S—, —S—P(S)(OH)—O—, —O—P(O)(H)—O—, —O—P(S)(H)—O—, —S—P(O)(H)—O, —S—P(S)(H)—O—, —S—P(O)(H)—S—, or —O—P(S)(H)—S—. Phosphate based cleavable linker can be evaluated using methods analogous to those described above.

[0720] In some embodiments, the linker is an acid cleavable linker. An acid cleavable linker is cleaved under acidic conditions. For example, in some embodiments the acid cleavable linker can be cleaved in an acidic environment with a pH of about 6.5 or less (e.g., about 6.0, 5.5, 5.0, or less). In some embodiments the acid cleavable linker can be cleaved by enzymes that can act as a general acid. In a cell (e.g., within a subject), specific low pH organelles, such as endosomes and lysosomes can provide a cleaving environment for acid cleavable linkers. Examples of acid cleavable linkers include but are not limited to hydrazones, esters, and esters of amino acids. Acid cleavable groups can have the general formula —C═NN—, C(O) O, or —OC(O). Acid cleavable linkers can be evaluated using methods analogous to those described above.

[0721] In some embodiments, the linker is an ester-based cleavable linker. An ester-based cleavable linker is cleaved by enzymes such as esterases and amidases in cells. Examples of ester-based cleavable include, but are not limited to, esters of alkylene, alkenylene and alkynylene groups. The cleavable bonds of ester cleavable linkers have the general formula —C(O)O— or —OC(O)—. Ester-based cleavable linkers can be evaluated using methods analogous to those described above.

[0722] In some embodiments, the linker is a peptide-based cleavable linker. A peptide-based cleavable linker is cleaved by enzymes such as peptidases and proteases (e.g., present in cells (e.g., cells within a subject)). Peptide-based cleavable linkers comprise peptide bonds formed between amino acids to yield polypeptides (e.g., dipeptides, tripeptides, etc.). As known in the art, peptide bonds. The peptide bonds (i.e., the amide bond) of the peptide linker is generally the site of cleavage. Peptide-based cleavable linkers can be evaluated using methods analogous to those described above.

### 4.4.3 Orientation

[0723] The heterologous moiety may be attached at any suitable position to the agent (e.g., described herein) (e.g., RNAi agent, dsRNA agent, antisense strand, sense strand).

[0724] In some embodiments, the heterologous moiety is conjugated to the 5′ end of the agent (e.g., described herein) (e.g., RNAi agent, dsRNA agent, antisense strand, sense strand). In some embodiments, the heterologous moiety is conjugated to the 3′ end of the agent (e.g., described herein) (e.g., RNAi agent, dsRNA agent, antisense strand, sense strand). In some embodiments, a first heterologous moiety is conjugated to the 5′ end of the agent (e.g., described herein) (e.g., RNAi agent, dsRNA agent, antisense strand, sense strand) and a second heterologous moiety is conjugated to the 3′ end of the agent (e.g., described herein) (e.g., RNAi agent, dsRNA agent, antisense strand, sense strand). The first and second heterologous moieties can be the same or different. In some embodiments, the heterologous moiety is conjugated to an internal site of the agent (e.g., described herein) (e.g., RNAi agent, dsRNA agent, antisense strand, sense strand).

[0725] In some embodiments, the agent (e.g., RNAi agent, dsRNA agent) comprises an antisense strand. In some embodiments, the heterologous moiety is conjugated to the 5′ end of the antisense strand. In some embodiments, the heterologous moiety is conjugated to the 3′ end of the antisense strand. In some embodiments, a first heterologous moiety is conjugated to the 5′ end of the antisense strand and a second heterologous moiety is conjugated to the 3′ end of the antisense strand. The first and second heterologous moieties can be the same or different. In some embodiments, the heterologous moiety is conjugated to an internal site of the antisense strand.

[0726] In some embodiments, the agent (e.g., RNAi agent, dsRNA agent) comprises a sense strand. In some embodiments, the heterologous moiety is conjugated to the 5′ end of the sense strand. In some embodiments, the heterologous moiety is conjugated to the 3′ end of the sense strand. In some embodiments, a first heterologous moiety is conjugated to the 5′ end of the sense strand and a second heterologous moiety is conjugated to the 3′ end of the sense strand. The first and second heterologous moieties can be the same or different. In some embodiments, the heterologous moiety is conjugated to an internal site of the sense strand.

[0727] The heterologous moiety may be attached to the 3′ end of the sense and/or antisense strand. The heterologous moiety may be attached to the 5′ end of the sense and/or antisense strand. The heterologous moiety may be attached to at an internal site of the sense and/or antisense strand. The heterologous moiety may be attached to the 3′ end of the sense and antisense strand. The heterologous moiety may be attached to the 5′ end of the sense and antisense strand. The heterologous moiety may be attached to at an internal site of the sense and antisense strand.

[0728] In some embodiments, the agent (e.g., RNAi agent) comprises a dsRNA agent comprising a sense strand and an antisense strand. In some embodiments, the heterologous moiety is conjugated to the 5′ end of the sense strand. In some embodiments, the heterologous moiety is conjugated to the 3′ end of the sense strand. In some embodiments, a first heterologous moiety is conjugated to the 5′ end of the sense strand and a second heterologous moiety is conjugated to the 3′ end of the sense strand. The first and second heterologous moieties can be the same or different. In some embodiments, the heterologous moiety is conjugated to an internal site of the sense strand. In some embodiments, the heterologous moiety is conjugated to the 5′ end of the sense strand. In some embodiments, the heterologous moiety is conjugated to the 3′ end of the sense strand. In some embodiments, a first heterologous moiety is conjugated to the 5′ end of the sense strand and a second heterologous moiety is conjugated to the 3′ end of the sense strand. The first and second heterologous moieties can be the same or different. In some embodiments, the heterologous moiety is conjugated to an internal site of the sense strand.

[0729] In some embodiments, a first heterologous moiety is conjugated to the 5′ end of the sense strand and a second heterologous moiety is conjugated to the 5′ end of the antisense strand. In some embodiments, a first heterologous moiety is conjugated to the 3′ end of the sense strand and a second heterologous moiety is conjugated to the 3′ end of the antisense strand. In some embodiments, a first heterologous moiety is conjugated to the 5′ end of the sense strand and a second heterologous moiety is conjugated to the 3′ end of the antisense strand. In some embodiments, a first heterologous moiety is conjugated to the 3′ end of the sense strand and a second heterologous moiety is conjugated to the 5′ end of the antisense strand. The first and second heterologous moieties can be the same or different.

[0730] In some embodiments, a first heterologous moiety is conjugated to an internal site of the sense strand and a second heterologous moiety is conjugated to the 5′ end of the antisense strand. In some embodiments, a first heterologous moiety is conjugated to an internal site of the sense strand and a second heterologous moiety is conjugated to the 3′ end of the antisense strand. In some embodiments, a first heterologous moiety is conjugated to an internal site of the antisense strand and a second heterologous moiety is conjugated to the 3′ end of the antisense strand. In some embodiments, a first heterologous moiety is conjugated to an internal site of the antisense strand and a second heterologous moiety is conjugated to the 5′ end of the antisense strand. The first and second heterologous moieties can be the same or different.

### 4.4.4 Exemplary Conjugates

[0731] The structure of exemplary conjugates comprising a GalNAc targeting moiety and a linker via a linker for conjugation to an agent (e.g., RNAi agent, dsRNA agent, antisense strand, sense strand) described herein is provided below.

[0732] For example, in some embodiments, the agent (e.g., RNAi agent, dsRNA agent, antisense strand, sense strand) is conjugated to a GalNAc targeting moiety through a linker e.g., as shown in the following schematic, wherein X is O or S (and further described in § 4.4.2).

[chemical structure]

[0733] In some embodiments, the agent (e.g., RNAi agent, dsRNA agent, antisense strand, sense strand) is conjugated to the GalNAc targeting moiety as shown in the schematic below:

[chemical structure]

[0734] In some embodiments, the GalNAc targeting moiety and linker comprises that set forth below in Formula XXXVI wherein one of X or Y is a polynucleotide, the other is a hydrogen.

[chemical structure]

[0735] In some embodiments, the GalNAc targeting moiety and linker comprises that set forth in any one of the following formulas, wherein in any of the following formulas wherein one of X or Y is a polynucleotide, the other is a hydrogen:

[chemical structure]

[chemical structure]

[chemical structure]

[0736] In specific embodiments, the targeting moiety comprises the GalNAc targeting moiety and linker set forth below in Formula I:

[chemical structure]

[0737] In specific embodiments, the targeting moiety comprises the GalNAc targeting moiety and linker set forth below in Formula XXXIX.

[chemical structure]

[0738] In specific preferred embodiments, the targeting moiety comprises the GalNAc targeting moiety and linker set forth below in Formula XXXIX, wherein the dsRNA agent is operably connected to the targeting moiety via the 3′ end of the sense strand. In specific embodiments, the targeting moiety comprises the GalNAc targeting moiety and linker set forth below in Formula XXXIX, wherein the dsRNA agent is operably connected to the targeting moiety via the 5′ end of the sense strand.

[0739] In some embodiments, the targeting moiety comprises the GalNAc targeting moiety and linker set forth below in Formula XXXIX, wherein the dsRNA agent is operably connected to the targeting moiety via the 3′ end of the antisense strand. In some embodiments, the targeting moiety comprises the GalNAc targeting moiety and linker set forth below in Formula XXXIX, wherein the dsRNA agent is operably connected to the targeting moiety via the 5′ end of the antisense strand.

[0740] In specific embodiments, the targeting moiety comprises the GalNAc targeting moiety and linker set forth below in Formula XL.

[chemical structure]

[0741] In specific preferred embodiments, the targeting moiety comprises the GalNAc targeting moiety and linker set forth below in Formula XL, wherein the dsRNA agent is operably connected to the targeting moiety via the 3′ end of the sense strand.

[0742] Further exemplary select conjugates are provided in Table 11 below.

TABLE 11
Exemplary dsRNA Agent Conjugates.

| | Corresponding | Corresponding | | | | |
|---|---|---|---|---|---|---|
| | Unconjugated | Unconjugated | | | | |
| | Unmodified | Modified | | | | |
| dsRNA | dsRNA | dsRNA | Sense | SEQ | Antisense | SEQ |
| Agent | Agent ID | Agent ID | Sequence | ID | Sequence | ID |
| ID | (Table 2) | (Table 3) | 5′ to 3′ | NO | 5′ to 3′ | NO |
| 483 | 129 | 479 | csasguauCfuAf | 1193 | (vinu)sCfsgag | 1188 |
| | | | AfUfauaagcucg | | CfuuauauuAfgA | |
| | | | a (GalNAc-TEG) | | fuacugsasc | |
| 484 | 129 | 481 | csasguauCfuAf | 1193 | (vinu)sCfsgag | 1190 |
| | | | AfUfauaagcucg | | CfuuauauuAfga | |
| | | | a (GalNAc-TEG) | | uacugsasc | |
| 485 | 172 | 482 | csasgaCfaguAf | 1194 | (vinu)sUfsauc | 1191 |
| | | | CfAfggcuagaua | | UfagccuguAfcu | |
| | | | a (GalNAc-TEG) | | gucugscsa | |
| 486 | 135 | 480 | usasauauAfaGf | 1195 | (vinu)sCfsaaa | 1189 |
| | | | CfUfcggaguuug | | CfuccgagcUfuA | |
| | | | a (GalNAc-TEG) | | fuauuasgsa | |
| 487 | 173 | 409 | asgsacagUfaCf | 1196 | (vinu)sUfsuau | 1062 |
| | | | AfGfgcuagauaa | | CfuAfGfccugUf | |
| | | | a (GalNAc-TEG) | | aCfugucusgsc | |

[0743] The nucleotide modifications set forth in Table 10, utilize the following abbreviations set forth in Table 4 above. As recited above, “(GalNAc-TEG)” recited in Table 10 indicates the conjugation of the GalNAc-TEG (see, e.g., Formula XXXIX above) to the 3′ end of the sense strand of each dsRNA agent set forth in Table 10. The corresponding base modified dsRNA agent (set forth in Table 3) as well as the corresponding base unmodified dsRNA agent (set forth in Table 2) for each of the GalNAc-dsRNA agents 483-487 is also set forth in Table 11.

[0744] In specific embodiments, the conjugate comprises the sense strand and the antisense strand of a dsRNA agent conjugate set forth in Table 11. In specific embodiments, the conjugate comprises the sense strand and the antisense strand of any one of dsRNA agent conjugates 483-487 set forth in Table 11. In specific embodiments, the conjugate comprises the sense strand and the antisense strand of dsRNA agent conjugates 483. In specific embodiments, the conjugate comprises the sense strand and the antisense strand of dsRNA agent conjugates 484. In specific embodiments, the conjugate comprises the sense strand and the antisense strand of dsRNA agent conjugates 485. In specific embodiments, the conjugate comprises the sense strand and the antisense strand of dsRNA agent conjugates 486. In specific embodiments, the conjugate comprises the sense strand and the antisense strand of dsRNA agent conjugates 487.

[0745] In specific embodiments, the conjugate is substantially similar to any one of dsRNA agent conjugates 483-487 set forth in Table 11. In specific embodiments, the conjugate is substantially similar to dsRNA agent conjugate 483. In specific embodiments, the conjugate is substantially similar to dsRNA agent conjugate 484. In specific embodiments, the conjugate is substantially similar to dsRNA agent conjugate 485. In specific embodiments, the conjugate is substantially similar to dsRNA agent conjugate 486. In specific embodiments, the conjugate is substantially similar to dsRNA agent conjugate 487.

[0746] In specific embodiments, the conjugate is any one of dsRNA agent conjugates 483-487 set forth in Table 11. In specific embodiments, the conjugate is dsRNA agent conjugate 483. In specific embodiments, the conjugate is dsRNA agent conjugate 484. In specific embodiments, the conjugate is dsRNA agent conjugate 485. In specific embodiments, the conjugate dsRNA agent conjugate 486. In specific embodiments, the conjugate is dsRNA agent conjugate 487.

[0747] In specific embodiments, the dsRNA agent is a conjugate comprising a sense strand and an antisense stand, wherein the sense strand comprises the sequence set forth in SEQ ID NO: 1193; and the antisense strand comprises the sequence set forth in SEQ ID NO: 1188. In specific embodiments, the dsRNA agent is a conjugate comprising a sense strand and an antisense stand, wherein the sense strand comprises the sequence set forth in SEQ ID NO: 1193; and the antisense strand comprises the sequence set forth in SEQ ID NO: 1190. In specific embodiments, the dsRNA agent is a conjugate comprising a sense strand and an antisense stand, wherein the sense strand comprises the sequence set forth in SEQ ID NO: 1194; and the antisense strand comprises the sequence set forth in SEQ ID NO: 1191. In specific embodiments, the dsRNA agent is a conjugate comprising a sense strand and an antisense stand, wherein the sense strand comprises the sequence set forth in SEQ ID NO: 1195; and the antisense strand comprises the sequence set forth in SEQ ID NO: 1189. In specific embodiments, the dsRNA agent is a conjugate comprising a sense strand and an antisense stand, wherein the sense strand comprises the sequence set forth in SEQ ID NO: 1196; and the antisense strand comprises the sequence set forth in SEQ ID NO: 1062.

[0748] In specific embodiments, the dsRNA agent is a conjugate comprising a sense strand and an antisense stand, wherein the sense strand consists of the sequence set forth in SEQ ID NO: 1193; and the antisense strand consists of the sequence set forth in SEQ ID NO: 1188. In specific embodiments, the dsRNA agent is a conjugate comprising a sense strand and an antisense stand, wherein the sense strand consists of the sequence set forth in SEQ ID NO: 1193; and the antisense strand consists of the sequence set forth in SEQ ID NO: 1190. In specific embodiments, the dsRNA agent is a conjugate comprising a sense strand and an antisense stand, wherein the sense strand consists of the sequence set forth in SEQ ID NO: 1194; and the antisense strand consists of the sequence set forth in SEQ ID NO: 1191. In specific embodiments, the dsRNA agent is a conjugate comprising a sense strand and an antisense stand, wherein the sense strand consists of the sequence set forth in SEQ ID NO: 1195; and the antisense strand consists of the sequence set forth in SEQ ID NO: 1189. In specific embodiments, the dsRNA agent is a conjugate comprising a sense strand and an antisense stand, wherein the sense strand consists of the sequence set forth in SEQ ID NO: 1196; and the antisense strand consists of the sequence set forth in SEQ ID NO: 1062.

[0749] In specific embodiments, the dsRNA agent is a conjugate comprising the sense strand set forth in SEQ ID NO: 1193; and the antisense strand set forth in SEQ ID NO: 1188. In specific embodiments, the dsRNA agent is a conjugate comprising the sense strand set forth in SEQ ID NO: 1193; and the antisense strand set forth in SEQ ID NO: 1190. In specific embodiments, the dsRNA agent is a conjugate comprising the sense strand set forth in SEQ ID NO: 1194; and the antisense strand set forth in SEQ ID NO: 1191. In specific embodiments, the dsRNA agent is a conjugate comprising the sense strand set forth in SEQ ID NO: 1195; and the antisense strand set forth in SEQ ID NO: 1189. In specific embodiments, the dsRNA agent is a conjugate comprising the sense strand set forth in SEQ ID NO: 1196; and the antisense strand set forth in SEQ ID NO: 1062.

### 4.5 Activity of RNAi Agents & Conjugates Thereof

[0750] In some embodiments, the agent (e.g., RNAi agent, e.g., dsRNA agent) inhibits expression of a target gene (e.g., CIDEB). In some embodiments, the agent (e.g., RNAi agent, e.g., dsRNA agent) inhibits expression of a target gene (e.g., CIDEB) in a cell. In some embodiments, the agent (e.g., RNAi agent, e.g., dsRNA agent) inhibits expression of a target gene (e.g., CIDEB) in a cell in a subject (e.g., a mammalian subject, e.g., a primate, human, non-human primate, mouse, rat, etc.). In some embodiments, the agent (e.g., RNAi agent, e.g., dsRNA agent) inhibits expression of a target gene (e.g., CIDEB) in a cell in a subject (e.g., a mammalian subject, e.g., a primate, human, non-human primate, mouse, rat, etc.) by at least about 30%, 40%, 50%, 55%, 60%, 65%, 70%, 75%, 80%, 85%, 90%, 95%, 96%, 97%, 98%, 99%, or 100%. In some embodiments, the agent (e.g., RNAi agent, e.g., dsRNA agent) mediates degradation of a target mRNA (e.g., a CIDEB (e.g., hCIDEB) mRNA). In some embodiments, the agent (e.g., RNAi agent, e.g., dsRNA agent) inhibits expression of a target gene (e.g., CIDEB) in a cell in a subject (e.g., a mammalian subject, e.g., a primate, human, non-human primate, mouse, rat, etc.) by at least about 50%, 55%, 60%, 65%, 70%, 75%, 80%, 85%, 90%, 95%, 96%, 97%, 98%, 99%, or 100%. In some embodiments, the agent (e.g., RNAi agent, e.g., dsRNA agent) inhibits expression of a target gene (e.g., CIDEB) in a cell in a subject (e.g., a mammalian subject, e.g., a primate, human, non-human primate, mouse, rat, etc.) by at least about 75%, 80%, 85%, 90%, 95%, 96%, 97%, 98%, 99%, or 100%. In some embodiments, the agent (e.g., RNAi agent, e.g., dsRNA agent) inhibits expression of a target gene (e.g., CIDEB) in a cell in a subject (e.g., a mammalian subject, e.g., a primate, human, non-human primate, mouse, rat, etc.) by at least about 90%, 95%, 96%, 97%, 98%, 99%, or 100%. In some embodiments, the agent (e.g., RNAi agent, e.g., dsRNA agent) inhibits expression of a target gene (e.g., CIDEB) in a cell in a subject (e.g., a mammalian subject, e.g., a primate, human, non-human primate, mouse, rat, etc.) by at least about 50%. In some embodiments, the agent (e.g., RNAi agent, e.g., dsRNA agent) inhibits expression of a target gene (e.g., CIDEB) in a cell in a subject (e.g., a mammalian subject, e.g., a primate, human, non-human primate, mouse, rat, etc.) by at least about 75%. In some embodiments, the agent (e.g., RNAi agent, e.g., dsRNA agent) inhibits expression of a target gene (e.g., CIDEB) in a cell in a subject (e.g., a mammalian subject, e.g., a primate, human, non-human primate, mouse, rat, etc.) by at least about 80%. In some embodiments, the agent (e.g., RNAi agent, e.g., dsRNA agent) inhibits expression of a target gene (e.g., CIDEB) in a cell in a subject (e.g., a mammalian subject, e.g., a primate, human, non-human primate, mouse, rat, etc.) by at least about 90%. In some embodiments, the agent (e.g., RNAi agent, e.g., dsRNA agent) inhibits expression of a target gene (e.g., CIDEB) in a cell in a subject (e.g., a mammalian subject, e.g., a primate, human, non-human primate, mouse, rat, etc.) by at least about 95%.

[0751] Any one or more of the above activities can be evaluated in vitro, ex vivo, or in vivo. Any one or more of the above activities can be evaluated by standard methods known in the art. For example, by PCR (e.g., qPCR), branched DNA assays, or by a protein-based methods (such as immunofluorescence analysis (using, e.g., western blotting or flow cytometric techniques). In some embodiments, inhibition of gene (e.g., CIDEB (e.g., hCIDEB)) expression is determined by qPCR.

### 4.6 Methods of Making RNAi Agents & Conjugates Thereof

[0752] An agent (e.g., described herein) (e.g., RNAi agent, dsRNA agent, antisense strand, sense strand) can be synthesized by standard methods known in the art (e.g., chemical synthesis (e.g., solid phase synthesis)). See, e.g., “Current protocols in nucleic acid chemistry,” Beaucage, S. L. et al. (Edrs.), John Wiley & Sons, Inc., New York, N.Y., USA, and See, e.g., Dong Y, Siegwart D J, Anderson D G. Strategies, design, and chemistry in siRNA delivery systems. Adv Drug Deliv Rev. 2019 April; 144:133-147. doi: 10.1016/j.addr.2019.05.004. Epub 2019 May 15. PMID: 31102606; PMCID: PMC6745264, the entire contents of each of which is incorporated by reference herein for all purposes. As such, further provided herein are methods of making an agent described herein) (e.g., RNAi agent, dsRNA agent, antisense strand, sense strand).

[0753] For example, single stranded nucleic acid molecules (e.g., described herein) (e.g., antisense strands, sense strands) can be prepared using solution-phase or solid-phase organic synthesis or both. dsRNA agents (e.g., described herein) can be prepared using a two-step procedure, wherein the individual strands of the dsRNA agent are prepared separately and subsequently annealed. The individual strands of the dsRNA agent can be prepared using solution-phase or solid-phase organic synthesis or both. Regardless of the method of synthesis, the agents (e.g., described herein) (e.g., dsRNA agents described herein) can be prepared in a solution (e.g., an aqueous or organic solution) that is appropriate for formulation. For example, the dsRNA agent can be precipitated and redissolved in pure double-distilled water, and lyophilized. The lyophilized dsRNA agent can be resuspended in a solution appropriate for the intended formulation process.

[0754] Likewise, conjugates (e.g., described herein) can be synthesized utilizing standard methods known in the art. See, e.g., Dong Y, Siegwart D J, Anderson D G. Strategies, design, and chemistry in siRNA delivery systems. Adv Drug Deliv Rev. 2019 April; 144:133-147. doi: 10.1016/j.addr.2019.05.004. Epub 2019 May 15. PMID: 31102606; PMCID: PMC6745264, the entire contents of which is incorporated herein by reference for all purposes. A person of ordinary skill in the art can determine the appropriate conjugation method based on e.g., the heterologous moiety and the agent to be conjugated. For example, standard conjugation methods include, e.g., parallel synthesis methods and linear synthesis methods.

### 4.7 Vectors

[0755] In some embodiments, one or more of the agents described herein (e.g., RNAi agents, double stranded RNA (dsRNA) agents, sense strands, antisense strands) (see, e.g., §§ 4.2, 4.3) are contained in a vector (e.g., a non-viral vector (e.g., a plasmid), a viral vector). Thus, in one aspect, also provided herein are vectors (e.g., non-viral vectors (e.g., plasmids) viral vectors) comprising one or more agent described herein (e.g., RNAi agent, double stranded RNA (dsRNA) agent, sense strand, antisense strand) (see, e.g., §§ 4.2, 4.3). Such vectors can be easily manipulated by methods well known to the ordinary person of skill in the art. The vector used can be any vector that is suitable for cloning nucleic acid molecules that can be used for transcription of the nucleic acid molecule of interest (e.g., an agent described herein (e.g., RNAi agent, double stranded RNA (dsRNA) agent, sense strand, antisense strand) (see, e.g., §§ 4.2, 4.3).

[0756] In some embodiments, the vector is a viral vector. Viral vectors include both RNA and DNA based vectors. The vectors can be designed to meet a variety of specifications. For example, viral vectors can be engineered to be capable or incapable of replication in prokaryotic and/or eukaryotic cells. In some embodiments, the vector is replication deficient. In some embodiments, the vector is replication competent. Vectors can be engineered or selected that either will (or will not) integrate in whole or in part into the genome of host cells, resulting (or not (e.g., episomal expression)) in stable host cells comprising the desired nucleic acid in their genome.

[0757] Exemplary viral vectors include, but are not limited to, adenovirus vectors, adeno-associated virus vectors, lentivirus vectors, retrovirus vectors, poxvirus vectors, parapoxivirus vectors, vaccinia virus vectors, fowlpox virus vectors, herpes virus vectors, adeno-associated virus vectors, alphavirus vectors, lentivirus vectors, rhabdovirus vectors, measles virus, Newcastle disease virus vectors, picornaviruses vectors, anellovectors, or lymphocytic choriomeningitis virus vectors. In some embodiments, the viral vector is an adenovirus vector, adeno-associated virus vector, lentivirus vector, anellovector (as described, for example, in U.S. Pat. No. 11,446,344, the entire contents of which is incorporated by reference herein for all purposes).

[0758] In some embodiments, the vector is an adenoviral vector (e.g., human adenoviral vector, e.g., HAdV or AdHu). In some embodiments, the adenovirus vector has the E1 region deleted, rendering it replication-deficient in human cells. Other regions of the adenovirus such as E3 and E4 may also be deleted. Exemplary adenovirus vectors include, but are not limited to, those described in e.g., WO2005071093 or WQ2006048215, the entire contents of each of which is incorporated by reference herein for all purposes. In some embodiments, the adenovirus-based vector used is a simian adenovirus, thereby avoiding dampening of the immune response after vaccination by pre-existing antibodies to common human entities such as AdHu5. Exemplary, simian adenovirus vectors include AdCh63 (see, e.g., WO2005071093, the entire contents of which is incorporated by reference herein for all purposes) or AdCh68.

[0759] Viral vectors can be generated through the use of a packaging/producer cell line (e.g., a mammalian cell line) using standard methods known to the person of ordinary skill in the art. Generally, a nucleic acid construct (e.g., a plasmid) encoding the transgene (e.g., an agent described herein) (along with additional elements e.g., a promoter, inverted terminal repeats (ITRs) flanking the transgene, a plasmid encoding e.g., viral replication and structural proteins, along with one or more helper plasmids a host cell (e.g., a host cell line) are transfected into a host cell line (i.e., the packing/producer cell line). In some instances, depending on the viral vector, a helper plasmid may also be needed that include helper genes from another virus (e.g., in the instance of adeno-associated viral vectors). Eukaryotic expression plasmids are commercially available from a variety of suppliers, for example the plasmid series: pcDNA™, pCR3.1™, pCMV™, pFRT™, pVAX1™, pCI™, Nanoplasmid™, and Pcaggs. The person of ordinary skill in the art is aware of numerous transfection methods and any suitable method of transfection may be employed (e.g., using a biochemical substance as carrier (e.g., lipofectamine), by mechanical means, or by electroporation,). The cells are cultured under conditions suitable and for a sufficient time for plasmid expression. The viral particles may be purified from the cell culture medium using standard methods known to the person of ordinary skill in the art. For example, by centrifugation followed by e.g., chromatography or ultrafiltration.

[0760] In some embodiments, the vector is a plasmid. A person of ordinary skill in the art is aware of suitable plasmids for expression of the DNA of interest. For example, Suitable plasmid DNA may be generated to allow efficient production of the encoded RNA in cell lines, e.g., in insect cell lines, for example using vectors as described in WO2009150222A2 and as defined in PCT claims 1 to 33, the disclosure relating to claims 1 to 33 of WO2009150222A2 the entire contents of which is incorporated by reference herein for all purposes.

### 4.8 Carriers

[0761] In some embodiments, one or more of the agents described herein (e.g., RNAi agents, double stranded RNA (dsRNA) agents, sense strands, antisense strands (or a conjugate comprising the same)) or a vector comprising any of the foregoing is formulated within one or more carrier.

[0762] Therefore, further provided herein are carriers comprising any one or more of the agents described herein (e.g., RNAi agents, double stranded RNA (dsRNA) agents, sense strands, antisense strands (or a conjugate comprising the same)) or a vector comprising any of the foregoing.

[0763] Any of the foregoing (e.g., one or more of the agents described herein (e.g., RNAi agents, double stranded RNA (dsRNA) agents, sense strands, antisense strands (or a conjugate comprising the same)) or a vector comprising any of the foregoing) can be encapsulated within a carrier, chemically conjugated to a carrier, associated with the carrier. In this context, the term “associated” refers to the essentially stable combination of an agent described herein (or a conjugate comprising the same) (or a vector comprising the same) with one or more molecules of a carrier (e.g., one or more lipids of a lipid-based carrier, e.g., an LNP, liposome, lipoplex, and/or nanoliposome) into larger complexes or assemblies without covalent binding. In this context, the term “encapsulation” refers to the incorporation of an agent described herein (or a conjugate comprising the same) (or a vector comprising the same) into a carrier (e.g., a lipid-based carrier, e.g., an LNP, liposome, lipoplex, and/or nanoliposome) wherein the agent described herein (or the conjugate comprising the same) (or the vector comprising the same) is entirely contained within the interior space of the carrier (e.g., the lipid-based carrier, e.g., the LNP, liposome, lipoplex, and/or nanoliposome).

[0764] Exemplary carriers includes, but are not limited to, lipid-based carriers (e.g., lipid nanoparticles (LNPs), liposomes, lipoplexes, and nanoliposomes). In some embodiments, the carrier is a lipid-based carrier. In some embodiments, the carrier is an LNP. In some embodiments, the LNP comprises a cationic lipid, a neutral lipid, a cholesterol, and/or a PEG lipid. Lipid based carriers are further described below in § 4.8.1.

### 4.8.1 Lipid Based Carriers/Lipid Nanoformulations

[0765] In some embodiments, an agent described herein (e.g., RNAi agent, double stranded RNA (dsRNA) agent, sense strand, antisense strand (or a conjugate comprising the same)) (or a vector comprising any of the foregoing) is encapsulated or associated with one or more lipids (e.g., cationic lipids and/or neutral lipids), thereby forming lipid-based carriers such as lipid nanoparticles (LNPs), liposomes, lipoplexes, or nanoliposomes.

[0766] In some embodiments, an agent described herein (e.g., RNAi agent, double stranded RNA (dsRNA) agent, sense strand, antisense strand (or a conjugate comprising the same)) (or a vector comprising any of the foregoing) is encapsulated in one or more lipids (e.g., cationic lipids and/or neutral lipids), thereby forming lipid-based carriers such as lipid nanoparticles (LNPs), liposomes, lipoplexes, or nanoliposomes. In some embodiments, an agent described herein (e.g., RNAi agent, double stranded RNA (dsRNA) agent, sense strand, antisense strand (or a conjugate comprising the same)) (or a vector comprising any of the foregoing) is associated with one or more lipids (e.g., cationic lipids and/or neutral lipids), thereby forming lipid-based carriers such as lipid nanoparticles (LNPs), liposomes, lipoplexes, or nanoliposomes. In some embodiments, an agent described herein (e.g., RNAi agent, double stranded RNA (dsRNA) agent, sense strand, antisense strand (or a conjugate comprising the same)) (or a vector comprising any of the foregoing) is encapsulated in LNPs (e.g., as described herein).

[0767] The agents (e.g., RNAi agents, double stranded RNA (dsRNA) agents, sense strands, antisense strands (or a conjugate comprising the same)) (or a vector comprising any of the foregoing) described herein may be completely or partially located in the interior space of the LNPs, liposomes, lipoplexes, and/or nanoliposomes, within the lipid layer/membrane, or associated with the exterior surface of the lipid layer/membrane. One purpose of incorporating an agent described herein (e.g., RNAi agent, double stranded RNA (dsRNA) agent, sense strand, antisense strand (or a conjugate comprising the same)) (or a vector comprising any of the foregoing) into LNPs, liposomes, lipoplexes, and/or nanoliposomes is to protect the agent from an environment which may contain enzymes or chemicals or conditions that degrade the agent from molecules or conditions that cause the rapid excretion of the agent. Moreover, incorporating an agent described herein (e.g., RNAi agent, double stranded RNA (dsRNA) agent, sense strand, antisense strand (or a conjugate comprising the same)) (or a vector comprising any of the foregoing) into LNPs, liposomes, lipoplexes, and/or nanoliposomes may promote the uptake of the agent, and hence, may enhance the therapeutic effect of the agent (e.g., RNAi agent, double stranded RNA (dsRNA) agent, sense strand, antisense strand (or a conjugate comprising the same)) (or a vector comprising any of the foregoing). Accordingly, incorporating an agent described herein (e.g., RNAi agent, double stranded RNA (dsRNA) agent, sense strand, antisense strand (or a conjugate comprising the same)) (or a vector comprising any of the foregoing), into LNPs, liposomes, lipoplexes, and/or nanoliposomes may be particularly suitable for a pharmaceutical composition described herein, e.g., for intramuscular and/or intradermal administration.

[0768] In some embodiments, an agent described herein (e.g., RNAi agent, double stranded RNA (dsRNA) agent, sense strand, antisense strand (or a conjugate comprising the same)) (or a vector comprising any of the foregoing) is formulated into a lipid-based carrier (or lipid nanoformulation). In some embodiments, the lipid-based carrier (or lipid nanoformulation) is a liposome or a lipid nanoparticle (LNP). In one embodiment, the lipid-based carrier is an LNP.

[0769] In some embodiments, the lipid-based carrier (or lipid nanoformulation) comprises a cationic lipid (e.g., an ionizable lipid), a non-cationic lipid (e.g., phospholipid), a structural lipid (e.g., cholesterol), and a PEG-modified lipid. In some embodiments, the lipid-based carrier (or lipid nanoformulation) contains one or more agent described herein (e.g., RNAi agent, double stranded RNA (dsRNA) agent, sense strand, antisense strand (or a conjugate comprising the same)) (or a vector comprising any of the foregoing), or a pharmaceutically acceptable salt thereof.

[0770] As described herein, suitable compounds to be used in the lipid-based carrier (or lipid nanoformulation) include all the isomers and isotopes of the compounds described above, as well as all the pharmaceutically acceptable salts, solvates, or hydrates thereof, and all crystal forms, crystal form mixtures, and anhydrides or hydrates.

[0771] In addition to one or more agent described herein, the lipid-based carrier (or lipid nanoformulation) may further include a second lipid. In some embodiments, the second lipid is a cationic lipid, a non-cationic (e.g., neutral, anionic, or zwitterionic) lipid, or an ionizable lipid.

[0772] One or more naturally occurring and/or synthetic lipid compounds may be used in the preparation of the lipid-based carrier (or lipid nanoformulation).

[0773] The lipid-based carrier (or lipid nanoformulation) may contain positively charged (cationic) lipids, neutral lipids, negatively charged (anionic) lipids, or a combination thereof.

### 4.8.1.1 Cationic Lipids (Positively Charged) and Ionizable Lipids

[0774] In some embodiments, the lipid-based carrier (or lipid nanoformulation) comprises one or more cationic lipids, e.g., a cationic lipid that can exist in a positively charged or neutral form depending on pH, or an amine-containing lipid that can be readily protonated. In some embodiments, the cationic lipid is a lipid capable of being positively charged, e.g., under physiological conditions.

[0775] Exemplary cationic lipids include one or more amine group(s) which bear the positive charge. Examples of positively charged (cationic) lipids include, but are not limited to, N,N′-dimethyl-N,N′-dioctacyl ammonium bromide (DDAB) and chloride DDAC), N-(1-(2,3-dioleyloxy)propyl)-N,N,N-trimethylammonium chloride (DOTMA), 3β-[N—(N′,N′-dimethylaminoethyl)carbamoyl) cholesterol (DC-chol), 1,2-dioleoyloxy-3-[trimethylammonio]-propane (DOTAP), 1,2-dioctadecyloxy-3-[trimethylammonio]-propane (DSTAP), and 1,2-dioleoyloxypropyl-3-dimethyl-hydroxy ethyl ammonium chloride (DORI), N,N-dioleyl-N,N-dimethylammonium chloride (DODAC), N,N-dimethyl-2,3-dioleyloxy)propylamine (DODMA), 1,2-Diolcoyl-3-Dimethylammonium-propane (DODAP), 1,2-Diolcoylcarbamyl-3-Dimethylammonium-propane (DOCDAP), 1,2-Dilincoyl-3-Dimethylammonium-propane (DLINDAP), 3-Dimethylamino-2-(Cholest-5-en-3-beta-oxybutan-4-oxy)-1-(cis,cis-9,12-octadecadienoxy) propane (CLinDMA), 2-[5′-(cholest-5-en-3-beta-oxy)-3′-oxapentoxy)-3-dimethyl-1-(cis, cis-9′,12′-octadecadienoxy) propane (CpLin DMA), N,N-Dimethyl-3,4-dioleyloxybenzylamine (DMOBA), and the cationic lipids described in e.g. Martin et al., Current Pharmaceutical Design, pages 1-394, the entire contents of which are incorporated by reference herein for all purposes. In some embodiments, the lipid-based carrier (or lipid nanoformulation) comprises more than one cationic lipid.

[0776] In some embodiments, the lipid-based carrier (or lipid nanoformulation) comprises a cationic lipid having an effective pKa over 6.0. In some embodiments, the lipid-based carrier (or lipid nanoformulation) further comprises a second cationic lipid having a different effective pKa (e.g., greater than the first effective pKa) than the first cationic lipid.

[0777] In some embodiments, cationic lipids that can be used in the lipid-based carrier (or lipid nanoformulation) include, for example those described in Table 4 of WO 2019/217941, the entire contents of which are incorporated by reference herein for all purposes.

[0778] In some embodiments, the cationic lipid is an ionizable lipid (e.g., a lipid that is protonated at low pH, but that remains neutral at physiological pH). In some embodiments, the lipid-based carrier (or lipid nanoformulation) may comprise one or more additional ionizable lipids, different than the ionizable lipids described herein. Exemplary ionizable lipids include, but are not limited to,

[chemical structure]

[chemical structure]

[0779] (see WO2017004143A1, the entire contents of which is incorporated herein by reference for all purposes).

[0780] In some embodiments, the lipid-based carrier (or lipid nanoformulation) further comprises one or more compounds described by WO 2021/113777 (e.g., a lipid of Formula (3) such as a lipid of Table 3 of WO 2021/113777), the entire contents of which are incorporated by reference herein for all purposes.

[0781] In one embodiment, the ionizable lipid is a lipid disclosed in Hou, X., et al. Nat Rev Mater 6, 1078-1094 (2021). https://doi.org/10.1038/s41578-021-00358-0 (e.g., L319, C12-200, and DLin-MC3-DMA), (the entire contents of which are incorporated by reference herein for all purposes).

[0782] Examples of other ionizable lipids that can be used in lipid-based carrier (or lipid nanoformulation) include, without limitation, one or more of the following formulas: X of US 2016/0311759; I of US20150376115 or in US 2016/0376224; Compound 5 or Compound 6 in US 2016/0376224; I, IA, or II of U.S. Pat. No. 9,867,888; I, II or III of US 2016/0151284; I, IA, II, or IIA of US 2017/0210967; I-c of US 2015/0140070; A of US 2013/0178541; I of US 2013/0303587 or US 2013/0123338; I of US 2015/0141678; II, III, IV, or V of US 2015/0239926; I of US 2017/0119904; I or II of WO 2017/117528; A of US 2012/0149894; A of US 2015/0057373; A of WO 2013/116126; A of US 2013/0090372; A of US 2013/0274523; A of US 2013/0274504; A of US 2013/0053572; A of WO 2013/016058; A of WO 2012/162210; I of US 2008/042973; I, II, III, or IV of US 2012/01287670; I or II of US 2014/0200257; I, II, or III of US 2015/0203446; I or III of US 2015/0005363; I, IA, IB, IC, ID, II, IIA, IIB, IIC, IID, or III-XXIV of US 2014/0308304; of US 2013/0338210; I, II, III, or IV of WO 2009/132131; A of US 2012/01011478; I or XXXV of US 2012/0027796; XIV or XVII of US 2012/0058144; of US 2013/0323269; I of US 2011/0117125; I, II, or III of US 2011/0256175; I, II, III, IV, V, VI, VII, VIII, IX, X, XI, XII of US 2012/0202871; I, II, III, IV, V, VI, VII, VIII, X, XII, XIII, XIV, XV, or XVI of US 2011/0076335; I or II of US 2006/008378; I of WO2015/074085 (e.g., ATX-002); I of US 2013/0123338; I or X-A-Y-Z of US 2015/0064242; XVI, XVII, or XVIII of US 2013/0022649; I, II, or III of US 2013/0116307; I, II, or III of US 2013/0116307; I or II of US 2010/0062967; I-X of US 2013/0189351; I of US 2014/0039032; V of US 2018/0028664; I of US 2016/0317458; I of US 2013/0195920; 5, 6, or 10 of U.S. Pat. No. 10,221,127; III-3 of WO 2018/081480; I-5 or 1-8 of WO 2020/081938; I of WO 2015/199952 (e.g., compound 6 or 22) and Table 1 therein; 18 or 25 of U.S. Pat. No. 9,867,888; A of US 2019/0136231; II of WO 2020/219876; 1 of US 2012/0027803; OF-02 of US 2019/0240349; 23 of U.S. Pat. No. 10,086,013; cKK-E12/A6 of Miao et al (2020); C12-200 of WO 2010/053572; 7C1 of Dahlman et al (2017); 304-O13 or 503-O13 of Whitehead et al; TS-P4C2 of U.S. Pat. No. 9,708,628; I of WO 2020/106946; I of WO 2020/106946; (1), (2), (3), or (4) of WO 2021/113777; and any one of Tables 1-16 of WO 2021/113777, the entire contents of each of which are incorporated by reference herein for all purposes.

[0783] In some embodiments, the lipid-based carrier (or lipid nanoformulation) further includes biodegradable ionizable lipids, for instance, (9Z,12Z)-3-((4,4-bis(octyloxy)butanoyl)oxy)-2-((((3-(diethylamino)propoxy)carbonyl)oxy)methyl)propyl octadeca-9,12-dienoate, also called 3-((4,4-bis(octyloxy)butanoyl)oxy)-2-((((3-(diethylamino)propoxy)carbonyl)oxy)methyl)propyl (9Z,12Z)-octadeca-9,12-dienoate). See, e.g., lipids of WO 2019/067992, WO 2017/173054, WO 2015/095340, and WO 2014/136086, the entire contents of each of which are incorporated by reference herein for all purposes.

### 4.8.1.2 Non-Cationic Lipids (e.g., Phospholipids)

[0784] In some embodiments, the lipid-based carrier (or lipid nanoformulation) further comprises one or more non-cationic lipids. In some embodiments, the non-cationic lipid is a phospholipid. In some embodiments, the non-cationic lipid is a phospholipid substitute or replacement. In some embodiments, the non-cationic lipid is a negatively charged (anionic) lipid.

[0785] Exemplary non-cationic lipids include, but are not limited to, distearoyl-sn-glycero-phosphoethanolamine, distearoylphosphatidylcholine (DSPC), dioleoylphosphatidylcholine (DOPC), dipalmitoylphosphatidylcholine (DPPC), dioleoylphosphatidylglycerol (DOPG), dipalmitoylphosphatidylglycerol (DPPG), dioleoyl-phosphatidylethanolamine (DOPE), palmitoyloleoylphosphatidylcholine (POPC), palmitoyloleoylphosphatidylethanolamine (POPE), dioleoyl-phosphatidylethanolamine 4-(N-maleimidomethyl)-cyclohexane-1-carboxylate (DOPE-mal), dipalmitoyl phosphatidyl ethanolamine (DPPE), dimyristoylphosphoethanolamine (DMPE), distearoyl-phosphatidyl-ethanolamine (DSPE), monomethyl-phosphatidylethanolamine (such as 16-O-monomethyl PE), dimethyl-phosphatidylethanolamine (such as 16-O-dimethyl PE), 18-1-trans PE, 1-stearoyl-2-oleoyl-phosphatidyethanolamine (SOPE), hydrogenated soy phosphatidylcholine (HSPC), egg phosphatidylcholine (EPC), dioleoylphosphatidylserine (DOPS), sphingomyelin (SM), dimyristoyl phosphatidylcholine (DMPC), dimyristoyl phosphatidylglycerol (DMPG), distearoylphosphatidylglycerol (DSPG), dierucoylphosphatidylcholine (DEPC), palmitoyloleyolphosphatidylglycerol (POPG), dielaidoyl-phosphatidylethanolamine (DEPE), 1,2-dilauroyl-sn-glycero-3-phosphocholine (DLPC), Sodium 1,2-ditetradecanoyl-sn-glycero-3-phosphate (DMPA), phosphatidylcholine (lecithin), phosphatidylethanolamine, lysolecithin, lysophosphatidylethanolamine, phosphatidylserine, phosphatidylinositol, sphingomyelin, egg sphingomyelin (ESM), phosphatidylethanolamine (cephalin), cardiolipin, phosphatidic acid, cerebrosides, dicetylphosphate, lysophosphatidylcholine, dilinoleoylphosphatidylcholine, or mixtures thereof. It is understood that other diacylphosphatidylcholine and diacylphosphatidylethanolamine phospholipids can also be used. The acyl groups in these lipids are preferably acyl groups derived from fatty acids having C₁₀-C₂₄ carbon chains, e.g., lauroyl, myristoyl, paimitoyl, stearoyl, or olcoyl. Additional exemplary lipids, in certain embodiments, include, without limitation, those described in Kim et al. (2020) dx.doi.org/10.1021/acs.nanolett.0c01386, the entire contents of which are incorporated by reference herein for all purposes. Such lipids include, in some embodiments, plant lipids found to improve liver transfection with mRNA (e.g., DGTS).

[0786] In some embodiments, the lipid-based carrier (or lipid nanoformulation) may comprise a combination of distearoylphosphatidylcholine/cholesterol, dipalmitoylphosphatidylcholine/cholesterol, dimyristoylphosphatidylcholine/cholesterol, 1,2-Dioleoyl-sn-glycero-3-phosphocholine (DOPC)/cholesterol, or egg sphingomyelin/cholesterol.

[0787] Other examples of suitable non-cationic lipids include, without limitation, nonphosphorous lipids such as, e.g., stearylamine, dodecylamine, hexadecylamine, acetyl palmitate, glycerol ricinoleate, hexadecyl stearate, isopropyl myristate, amphoteric acrylic polymers, triethanolamine-lauryl sulfate, alkyl-aryl sulfate polyethyloxylated fatty acid amides, dioctadecyl dimethyl ammonium bromide, ceramide, sphingomyelin, and the like. Other non-cationic lipids are described in WO 2017/099823 or US 2018/0028664, the entire contents of each of which are incorporated by reference herein for all purposes.

[0788] In one embodiment, the lipid-based carrier (or lipid nanoformulation) further comprises one or more non-cationic lipid that is oleic acid or a compound of Formula I, II, or IV of US 2018/0028664, the entire contents of which are incorporated by reference herein for all purposes.

[0789] The non-cationic lipid content can be, for example, 0-30% (mol) of the total lipid components present. In some embodiments, the non-cationic lipid content is 5-20% (mol) or 10-15% (mol) of the total lipid components present.

[0790] In some embodiments, the lipid-based carrier (or lipid nanoformulation) further comprises a neutral lipid, and the molar ratio of an ionizable lipid to a neutral lipid ranges from about 2:1 to about 8:1 (e.g., about 2:1, 3:1, 4:1, 5:1, 6:1, 7:1, or 8:1).

[0791] In some embodiments, the lipid-based carrier (or lipid nanoformulation) does not include any phospholipids.

[0792] In some embodiments, the lipid-based carrier (or lipid nanoformulation) can further include one or more phospholipids, and optionally one or more additional molecules of similar molecular shape and dimensions having both a hydrophobic moiety and a hydrophilic moiety (e.g., cholesterol).

### 4.8.1.3 Structural Lipids

[0793] The lipid-based carrier (or lipid nanoformulation) described herein may further comprise one or more structural lipids. As used herein, the term “structural lipid” refers to sterols (e.g., cholesterol) and also to lipids containing sterol moieties.

[0794] Incorporation of structural lipids in the lipid nanoparticle may help mitigate aggregation of other lipid in the particle. Structural lipids can be selected from the group including but not limited to, cholesterol or cholesterol derivative, fecosterol, sitosterol, ergosterol, campesterol, stigmasterol, brassicasterol, tomatidine, tomatine, ursolic acid, alpha-tocopherol, hopanoids, phytosterols, steroids, and mixtures thereof. In some embodiments, the structural lipid is a sterol. In certain embodiments, the structural lipid is a steroid. In certain embodiments, the structural lipid is cholesterol. In certain embodiments, the structural lipid is an analog of cholesterol. In certain embodiments, the structural lipid is alpha-tocopherol.

[0795] In some embodiments, structural lipids may be incorporated into the lipid-based carrier at molar ratios ranging from about 0.1 to 1.0 (cholesterol phospholipid).

[0796] In some embodiments, sterols, when present, can include one or more of cholesterol or cholesterol derivatives, such as those described in WO 2009/127060 or US 2010/0130588, the entire contents of each of which are incorporated by reference herein for all purposes. Additional exemplary sterols include phytosterols, including those described in Eygeris et al. (2020), Nano Lett. 2020; 20(6): 4543-4549, the entire contents of which are incorporated by reference herein for all purposes.

[0797] In some embodiments, the structural lipid is a cholesterol derivative. Non-limiting examples of cholesterol derivatives include polar analogues such as 5a-cholestanol, 53-coprostanol, cholesteryl-(2′-hydroxy)-ethyl ether, cholesteryl-(4′-hydroxy)-butyl ether, and 6-ketocholestanol; non-polar analogues such as 5a-cholestane, cholestenone, 5a-cholestanone, 5p-cholestanone, and cholesteryl decanoate; and mixtures thereof. In some embodiments, the cholesterol derivative is a polar analogue, e.g., cholesteryl-(4′-hydroxy)-butyl ether. Exemplary cholesterol derivatives are described in WO 2009/127060 and US 2010/0130588, the entire contents of each of which are incorporated by reference herein for all purposes.

[0798] In some embodiments, the lipid-based carrier (or lipid nanoformulation) further comprises sterol in an amount of 0-50 mol % (e.g., 0-10 mol %, 10-20 mol %, 20-50 mol %, 20-30 mol %, 30-40 mol %, or 40-50 mol %) of the total lipid components.

### 4.8.1.4 Polymers and Polyethylene Glycol (PEG)-Lipids

[0799] In some embodiments, the lipid-based carrier (or lipid nanoformulation) may include one or more polymers or co-polymers, e.g., poly(lactic-co-glycolic acid) (PFAG) nanoparticles.

[0800] In some embodiments, the lipid-based carrier (or lipid nanoformulation) may include one or more polyethylene glycol (PEG) lipid. Examples of useful PEG-lipids include, but are not limited to, 1,2-Diacyl-sn-Glycero-3-Phosphoethanolamine-N-[Methoxy (Polyethylene glycol)-(mPEG 350 PE); 1,2-Diacyl-sn-Glycero-3-Phosphoethanolamine-N-[Methoxy (Polyethylene glycol)-550] (mPEG 550 PE); 1,2-Diacyl-sn-Glycero-3-Phosphoethanolamine-N-[Methoxy (Polyethylene glycol)-750] (mPEG 750 PE); 1,2-Diacyl-sn-Glycero-3-Phosphoethanolamine-N-[Methoxy (Polyethylene glycol)-1000] (mPEG 1000 PE); 1,2-Diacyl-sn-Glycero-3-Phosphoethanolamine-N-[Methoxy (Polyethylene glycol)-2000] (mPEG 2000 PE); 1,2-Diacyl-sn-Glycero-3-Phosphoethanolamine-N-[Methoxy (Polyethylene glycol)-3000] (mPEG 3000 PE); 1,2-Diacyl-sn-Glycero-3-Phosphoethanolamine-N-[Methoxy (Polyethylene glycol)-(mPEG 5000 PE); N-Acyl-Sphingosine-1-[Succinyl(Methoxy Polyethylene Glycol) 750] (mPEG 750 Ceramide); N-Acyl-Sphingosine-1-[Succinyl(Methoxy Polyethylene Glycol) 2000] (mPEG 2000 Ceramide); and N-Acyl-Sphingosine-1-[Succinyl(Methoxy Polyethylene Glycol) 5000] (mPEG 5000 Ceramide). In some embodiments, the PEG lipid is a polyethyleneglycol-diacylglycerol (i.e., polyethyleneglycol diacylglycerol (PEG-DAG), PEG-cholesterol, or PEG-DMB) conjugate.

[0801] In some embodiments, the lipid-based carrier (or nanoformulation) includes one or more conjugated lipids (such as PEG-conjugated lipids or lipids conjugated to polymers described in Table 5 of WO 2019/217941, the entire contents of which are incorporated by reference herein for all purposes). In some embodiments, the one or more conjugated lipids is formulated with one or more ionic lipids (e.g., non-cationic lipid such as a neutral or anionic, or zwitterionic lipid); and one or more sterols (e.g., cholesterol).

[0802] The PEG conjugate can comprise a PEG-dilaurylglycerol (C12), a PEG-dimyristylglycerol (C14), a PEG-dipalmitoylglycerol (C16), a PEG-disterylglycerol (C18), PEG-dilaurylglycamide (C12), PEG-dimyristylglycamide (C14), PEG-dipalmitoylglycamide (C16), and PEG-disterylglycamide (C18).

[0803] In some embodiments, conjugated lipids, when present, can include one or more of PEG-diacylglycerol (DAG) (such as 1-(monomethoxy-polyethyleneglycol)-2,3-dimyristoylglycerol (PEG-DMG)), PEG-dialkyloxypropyl (DAA), PEG-phospholipid, PEG-ceramide (Cer), a pegylated phosphatidylethanoloamine (PEG-PE), PEG succinate diacylglycerol (PEGS-DAG) (such as 4-O-(2′,3′-di(tetradecanoyloxy)propyl-1-O-(w-methoxy (polyethoxy)ethyl) butanedioate (PEG-S-DMG)), PEG dialkoxypropylcarbam, N-(carbonyl-methoxypolyethylene glycol 2000)-1,2-distearoyl-sn-glycero-3-phosphoethanolamine sodium salt, and those described in Table 2 of WO 2019/051289 (the entire contents of which are incorporated by reference herein for all purposes), and combinations of the foregoing.

[0804] Additional exemplary PEG-lipid conjugates are described, for example, in U.S. Pat. Nos. 5,885,613, 6,287,591, US 2003/0077829, US 2003/0077829, US 2005/0175682, US 2008/0020058, US 2011/0117125, US 2010/0130588, US 2016/0376224, US 2017/0119904, US 2018/0028664, and WO 2017/099823, the entire contents of each of which are incorporated by reference herein for all purposes.

[0805] In some embodiments, the PEG-lipid is a compound of Formula III, III-a-I, III-a-2, III-b-1, III-b-2, or V of US 2018/0028664, which is incorporated herein by reference in its entirety. In some embodiments, the PEG-lipid is of Formula II of US 2015/0376115 or US 2016/0376224, the entire contents of each of which are incorporated by reference herein for all purposes. In some embodiments, the PEG-DAA conjugate can be, for example, PEG-dilauryloxypropyl, PEG-dimyristyloxypropyl, PEG-dipalmityloxypropyl, or PEG-distearyloxypropyl. In some embodiments, the PEG-lipid includes one of the following:

[chemical structure]

[0806] In some embodiments, lipids conjugated with a molecule other than a PEG can also be used in place of PEG-lipid. For example, polyoxazoline (POZ)-lipid conjugates, polyamide-lipid conjugates (such as ATTA-lipid conjugates), and cationic-polymer lipid (GPL) conjugates can be used in place of or in addition to the PEG-lipid.

[0807] Exemplary conjugated lipids, e.g., PEG-lipids, (POZ)-lipid conjugates, ATTA-lipid conjugates and cationic polymer-lipids, include those described in Table 2 of WO 2019/051289A9, the entire contents of which are incorporated by reference herein for all purposes.

[0808] In some embodiments, the conjugated lipid (e.g., the PEGylated lipid) can be present in an amount of 0-20 mol % of the total lipid components present in the lipid-based carrier (or lipid nanoformulation). In some embodiments, the conjugated lipid (e.g., the PEGylated lipid) content is 0.5-10 mol % or 2-5 mol % of the total lipid components.

[0809] When needed, the lipid-based carrier (or lipid nanoformulation) described herein may be coated with a polymer layer to enhance stability in vivo (e.g., sterically stabilized LNPs).

[0810] Examples of suitable polymers include, but are not limited to, poly(ethylene glycol), which may form a hydrophilic surface layer that improves the circulation half-life of liposomes and enhances the amount of lipid nanoformulations (e.g., liposomes or LNPs) that reach therapeutic targets. See, e.g., Working et al. J Pharmacol Exp Ther, 289: 1128-1133 (1999); Gabizon et al., J Controlled Release 53: 275-279 (1998); Adlakha Hutcheon et al., Nat Biotechnol 17: 775-779 (1999); and Koning et al., Biochim Biophys Acta 1420: 153-167 (1999), the entire contents of each of which are incorporated by reference herein for all purposes.

### 4.8.1.5 Percentages of Lipid Nanoformulation Components

[0811] In some embodiments, the lipid-based carrier (or lipid nanoformulation) comprises one of more of the agents described herein (e.g., RNAi agents, double stranded RNA (dsRNA) agents, sense strands, antisense strands (or a conjugate comprising the same)) (or a vector comprising any of the foregoing), optionally a non-cationic lipid (e.g., a phospholipid), a sterol, a neutral lipid, and optionally conjugated lipid (e.g., a PEGylated lipid) that inhibits aggregation of particles. In some embodiments, the lipid-based carrier (or lipid nanoformulation) further comprises an agent (e.g., an agent described herein (e.g., RNAi agent, double stranded RNA (dsRNA) agent, sense strand, antisense strand (or a conjugate comprising the same)) (or a vector comprising any of the foregoing))). The amounts of these components can be varied independently and to achieve desired properties. For example, in some embodiments, the ionizable lipid including the lipid compounds described herein is present in an amount from about 20 mol % to about 100 mol % (e.g., 20-90 mol %, 20-80 mol %, 20-70 mol %, 25-100 mol %, 30-70 mol %, 30-60 mol %, 30-40 mol %, 40-50 mol %, or 50-90 mol %) of the total lipid components; a non-cationic lipid (e.g., phospholipid) is present in an amount from about 0 mol % to about 50 mol % (e.g., 0-40 mol %, 0-30 mol %, 5-50 mol %, 5-40 mol %, 5-30 mol %, or 5-10 mol %) of the total lipid components, a conjugated lipid (e.g., a PEGylated lipid) in an amount from about 0.5 mol % to about 20 mol % (e.g., 1-10 mol % or 5-10%) of the total lipid components, and a sterol in an amount from about 0 mol % to about 60 mol % (e.g., 0-50 mol %, 10-60 mol %, 10-50 mol %, 15-60 mol %, 15-50 mol %, 20-50 mol %, 20-40 mol %) of the total lipid components, provided that the total mol % of the lipid component does not exceed 100%.

[0812] In some embodiments, the lipid-based carrier (or lipid nanoformulation) comprises about 25-100 mol % of the ionizable lipid including the lipid compounds described herein, about 0-50 mol % phospholipid, about 0-50 mol % sterol, and about 0-10 mol % PEGylated lipid.

[0813] In some embodiments, the lipid-based carrier comprises an agent described herein (e.g., RNAi agent, double stranded RNA (dsRNA) agent, sense strand, antisense strand (or a conjugate comprising the same)) (or a vector comprising any of the foregoing) that is formulated in a lipid nanoparticle, wherein the lipid nanoparticle comprises about 25-100 mol % of the ionizable lipid including the lipid compounds described herein, about 0-50 mol % phospholipid, about 0-50 mol % sterol, and about 0-10 mol % PEGylated lipid. In some embodiments, the encapsulation efficiency of the agent may be at least 70%.

[0814] In one embodiment, the lipid-based carrier (or lipid nanoformulation) comprises about 25-100 mol % of the ionizable lipid including the lipid compounds described herein; about 0-40 mol % phospholipid (e.g., DSPC), about 0-50 mol % sterol (e.g., cholesterol), and about 0-10 mol % PEGylated lipid.

[0815] In some embodiments, the lipid-based carrier comprises an agent described herein (e.g., RNAi agent, double stranded RNA (dsRNA) agent, sense strand, antisense strand (or a conjugate comprising the same)) (or a vector comprising any of the foregoing) that is formulated in a lipid nanoparticle, wherein the lipid nanoparticle comprises about 25-100 mol % of the ionizable lipid including the lipid compounds described herein; about 0-40 mol % phospholipid (e.g., DSPC), about 0-50 mol % sterol (e.g., cholesterol), and about 0-10 mol % PEGylated lipid. In some embodiments, the encapsulation efficiency of the agent may be at least 70%.

[0816] In some embodiments, the lipid-based carrier (or lipid nanoformulation) comprises about 30-60 mol % (e.g., about 35-55 mol %, or about 40-50 mol %) of the ionizable lipid including the lipid compounds described herein, about 0-30 mol % (e.g., 5-25 mol %, or 10-20 mol %) phospholipid, about 15-50 mol % (e.g., 18.5-48.5 mol %, or 30-40 mol %) sterol, and about 0-10 mol % (e.g., 1-5 mol %, or 1.5-2.5 mol %) PEGylated lipid.

[0817] In some embodiments, the lipid-based carrier comprises an agent described herein (e.g., RNAi agent, double stranded RNA (dsRNA) agent, sense strand, antisense strand (or a conjugate comprising the same)) (or a vector comprising any of the foregoing) that is formulated in a lipid nanoparticle, wherein the lipid nanoparticle comprises about 30-60 mol % (e.g., about 35-55 mol %, or about 40-50 mol %) of the ionizable lipid including the lipid compounds described herein, about 0-30 mol % (e.g., 5-25 mol %, or 10-20 mol %) phospholipid, about 15-50 mol % (e.g., 18.5-48.5 mol %, or 30-40 mol %) sterol, and about 0-10 mol % (e.g., 1-5 mol %, or 1.5-2.5 mol %) PEGylated lipid. In some embodiments, the encapsulation efficiency of the agent may be at least 70%.

[0818] In some embodiments, molar ratios of ionizable lipid/sterol/phospholipid (or another structural lipid)/PEG-lipid/additional components is varied in the following ranges: ionizable lipid (25-100%); phospholipid (DSPC) (0-40%); sterol (0-50%); and PEG lipid (0-5%).

[0819] In some embodiments, the lipid-based carrier comprises an agent described herein (e.g., RNAi agent, double stranded RNA (dsRNA) agent, sense strand, antisense strand (or a conjugate comprising the same)) (or a vector comprising any of the foregoing) that is formulated in a lipid nanoparticle, wherein the lipid nanoparticle comprises molar ratios of ionizable lipid/sterol/phospholipid (or another structural lipid)/PEG-lipid/additional components in the following ranges: ionizable lipid (25-100%); phospholipid (DSPC) (0-40%); sterol (0-50%); and PEG lipid (0-5%). In some embodiments, the encapsulation efficiency of the agent may be at least 70%.

[0820] In some embodiments, the lipid-based carrier (or lipid nanoformulation) comprises, by mol % or wt % of the total lipid components, 50-75% ionizable lipid (including the lipid compound as described herein), 20-40% sterol (e.g., cholesterol or derivative), 0 to 10% non-cationic-lipid, and 1-10% conjugated lipid (e.g., the PEGylated lipid).

[0821] In some embodiments, the lipid-based carrier comprises an agent described herein (e.g., RNAi agent, double stranded RNA (dsRNA) agent, sense strand, antisense strand (or a conjugate comprising the same)) (or a vector comprising any of the foregoing) that is formulated in a lipid nanoparticle, wherein the lipid nanoparticle comprises, by mol % or wt % of the total lipid components, 50-75% ionizable lipid (including the lipid compound as described herein), 20-40% sterol (e.g., cholesterol or derivative), 0 to 10% non-cationic-lipid, and 1-10% conjugated lipid (e.g., the PEGylated lipid). In some embodiments, the encapsulation efficiency of the agent may be at least 70%.

[0822] In some embodiments, the lipid-based carrier (or lipid nanoformulation) comprises (i) an agent described herein (e.g., RNAi agent, double stranded RNA (dsRNA) agent, sense strand, antisense strand (or a conjugate comprising the same)) (or a vector comprising any of the foregoing); (ii) a cationic lipid comprising from 50 mol % to 65 mol % of the total lipid present in the lipid-based carrier; (iii) a non-cationic lipid comprising a mixture of a phospholipid and a cholesterol derivative thereof, wherein the phospholipid comprises from 3 mol % to 15 mol % of the total lipid present in the lipid-based carrier and the cholesterol or derivative thereof comprises from 30 mol % to 40 mol % of the total lipid present in the lipid-based carrier; and (iv) a conjugated lipid comprising 0.5 mol % to 2 mol % of the total lipid present in the particle.

[0823] In some embodiments, the lipid-based carrier (or lipid nanoformulation) comprises (i) an agent described herein (e.g., RNAi agent, double stranded RNA (dsRNA) agent, sense strand, antisense strand (or a conjugate comprising the same)) (or a vector comprising any of the foregoing); (ii) a cationic lipid comprising from 50 mol % to 85 mol % of the total lipid present in the lipid-based carrier; (iii) a non-cationic lipid comprising from 13 mol % to 49.5 mol % of the total lipid present in the lipid-based carrier; and (d) a conjugated lipid comprising from 0.5 mol % to 2 mol % of the total lipid present in the lipid-based carrier.

[0824] In some embodiments, the phospholipid component in the mixture may be present from 2 mol % to 20 mol %, from 2 mol % to 15 mol %, from 2 mol % to 12 mol %, from 4 mol % to 15 mol %, from 4 mol % to 10 mol %, from 5 mol % to 10 mol %, (or any fraction of these ranges) of the total lipid components. In some embodiments, the lipid-based carrier (or lipid nanoformulation) is phospholipid-free.

[0825] In some embodiments, the sterol component (e.g. cholesterol or derivative) in the mixture may comprise from 25 mol % to 45 mol %, from 25 mol % to 40 mol %, from 25 mol % to 35 mol %, from 25 mol % to 30 mol %, from 30 mol % to 45 mol %, from 30 mol % to 40 mol %, from 30 mol % to 35 mol %, from 35 mol % to 40 mol %, from 27 mol % to 37 mol %, or from 27 mol % to 35 mol % (or any fraction of these ranges) of the total lipid components.

[0826] In some embodiments, the non-ionizable lipid components in the lipid-based carrier (or lipid nanoformulation) may be present from 5 mol % to 90 mol %, from 10 mol % to 85 mol %, or from 20 mol % to 80 mol % (or any fraction of these ranges) of the total lipid components.

[0827] The ratio of total lipid components to the agent (e.g., an encapsulated agent such as an agent described herein (e.g., RNAi agent, double stranded RNA (dsRNA) agent, sense strand, antisense strand (or a conjugate comprising the same)) (or a vector comprising any of the foregoing) can be varied as desired. For example, the total lipid components to the agent (mass or weight) ratio can be from about 10:1 to about 30:1. In some embodiments, the total lipid components to the agent ratio (mass/mass ratio; w/w ratio) can be in the range of from about 1:1 to about 25:1, from about 10:1 to about 14:1, from about 3:1 to about 15:1, from about 4:1 to about 10:1, from about 5:1 to about 9:1, or about 6:1 to about 9:1. The amounts of total lipid components and the agent can be adjusted to provide a desired N/P ratio, for example, N/P ratio of 3, 4, 5, 6, 7, 8, 9, 10, 11, 12, 13, 14, 15, 16, 17, 18, 19, 20, 21, 22, 23, 24, 25, 26, 27, 28, 29, 30, or higher. Generally, the lipid-based carrier (or lipid nanoformulation's) overall lipid content can range from about 5 mg/ml to about 30 mg/mL. Nitrogen:phosphate ratios (N:P ratio) is evaluated at values between 0.1 and 100.

[0828] The efficiency of encapsulation of an agent (e.g., an agent described herein), describes the amount of agent that is encapsulated or otherwise associated with a lipid nanoformulation (e.g., liposome or LNP) after preparation, relative to the initial amount provided. The encapsulation efficiency is desirably high (e.g., at least 70%, 80%, 90%, 95%, close to 100%). The encapsulation efficiency may be measured, for example, by comparing the amount of agent in a solution containing the liposome or LNP before and after breaking up the liposome or LNP with one or more organic solvents or detergents. An anion exchange resin may be used to measure the amount of free agent in a solution. Fluorescence may be used to measure the amount of free agent in a solution. For the lipid-based carrier (or lipid nanoformulation) described herein, the encapsulation efficiency of a protein and/or nucleic acid may be at least 50%, for example 50%, 55%, 60%, 65%, 70%, 75%, 80%, 85%, 90%, 91%, 92%, 93%, 94%, 95%, 96%, 97%, 98%, 99%, or 100%. In some embodiments, the encapsulation efficiency may be at least 70%. In some embodiments, the encapsulation efficiency may be at least 80%. In some embodiments, the encapsulation efficiency may be at least 90%. In some embodiments, the encapsulation efficiency may be at least 95%.

### 4.9 Host Cells

[0829] In one aspect, provided herein are host cells comprising any one more agent described herein (e.g., an RNAi agent, a dsRNA agent, an antisense strand, a sense strand) (see, e.g., §§ 4.2, 0); a vector described herein (see, e.g., § 4.6); a conjugate described herein (see, e.g., § 4.4); a carrier described herein (see, e.g., § 4.8); or any combination thereof. In some embodiments, the host cell comprises an RNAi agent described herein, a dsRNA agent described herein, an antisense strand described herein, and/or a sense strand described herein. In some embodiments, the host cell is in vitro, ex vivo, or in vivo.

### 4.10 Pharmaceutical Compositions

[0830] In one aspect, provided herein are pharmaceutical compositions comprising any one more agent described herein (e.g., an RNAi agent, a dsRNA agent, an antisense strand, a sense strand) (see, e.g., §§ 4.2, 4.3); a vector described herein (see, e.g., § 4.6); a conjugate described herein (see, e.g., § 4.4); a carrier described herein (see, e.g., § 4.8); and/or a host cell described herein (see, e.g., § 4.9); or any combination thereof; and a pharmaceutically acceptable excipient (see, e.g., Remington's Pharmaceutical Sciences (1990) Mack Publishing Co., Easton, PA, the entire contents of which is incorporated by reference herein for all purposes).

[0831] In one aspect, also provided herein are methods of making pharmaceutical compositions described herein comprising providing any one more agent described herein (e.g., an RNAi agent, a dsRNA agent, an antisense strand, a sense strand) (see, e.g., §§ 4.2, 4.3); a vector described herein (see, e.g., § 4.6); a conjugate described herein (see, e.g., § 4.4); a carrier described herein (see, e.g., § 4.8); and/or a host cell described herein (see, e.g., § 4.9); and formulating it into a pharmaceutically acceptable composition by the addition of one or more pharmaceutically acceptable excipient.

[0832] Also provided herein are pharmaceutical compositions comprising any one more agent described herein (e.g., an RNAi agent, a dsRNA agent, an antisense strand, a sense strand); vector described herein; conjugate described herein; carrier described herein; and/or cell described herein, wherein the pharmaceutical composition lacks a predetermined threshold amount or a detectable amount of a process impurity or contaminant, e.g., lacks a predetermined threshold amount or a detectable amount of a process-related impurity such as host cell proteins, host cell DNA, or a cell culture component (e.g., inducers, antibiotics, or media components); a product-related impurity (e.g., precursors, fragments, aggregates, degradation products); or a contaminant, e.g., endotoxin, bacteria, viral contaminant.

[0833] Acceptable excipients (e.g., carriers and stabilizers) are preferably nontoxic to recipients at the dosages and concentrations employed, and include buffers such as phosphate, citrate, or other organic acids; antioxidants including ascorbic acid or methionine; preservatives (such as octadecyldimethylbenzyl ammonium chloride; hexamethonium chloride; benzalkonium chloride, benzethonium chloride; phenol, butyl or benzyl alcohol; alkyl parabens such as methyl or propyl paraben; catechol; resorcinol; cyclohexanol; 3-pentanol; or m-cresol); low molecular weight (less than about 10 residues) polypeptides; proteins, such as serum albumin, gelatin, or immunoglobulins; hydrophilic polymers such as polyvinylpyrrolidone; amino acids such as glycine, glutamine, asparagine, histidine, arginine, or lysine; monosaccharides, disaccharides, or other carbohydrates including glucose, mannose, or dextrins; chelating agents such as EDTA; sugars such as sucrose, mannitol, trehalose or sorbitol; salt-forming counter-ions such as sodium; metal complexes (e.g., Zn-protein complexes); and/or non-ionic surfactants such as TWEEN™, PLURONICS™ or polyethylene glycol (PEG).

[0834] A pharmaceutical composition may be formulated for any route of administration to a subject. Non-limiting embodiments include parenteral administration, such as intramuscular, intradermal, subcutaneous, transcutaneous, or mucosal.

[0835] In one embodiment, the pharmaceutical composition is formulated for administration by intramuscular, intradermal, or subcutaneous injection. In one embodiment, the pharmaceutical composition is formulated for administration by intramuscular injection. In one embodiment, the pharmaceutical composition is formulated for administration by intradermal injection. In one embodiment, the pharmaceutical composition is formulated for administration by subcutaneous injection. Injectables can be prepared in conventional forms, either as liquid solutions or suspensions. The injectables can contain one or more excipients. Exemplary excipients include, for example, water, saline, dextrose, glycerol or ethanol. In addition, if desired, the pharmaceutical compositions to be administered can also contain minor amounts of non-toxic auxiliary substances such as wetting or emulsifying agents, pH buffering agents, stabilizers, solubility enhancers, or other such agents, such as for example, sodium acetate, sorbitan monolaurate, triethanolamine oleate or cyclodextrins. In some embodiments, the pharmaceutical composition is formulated in a single dose. In some embodiments, the pharmaceutical compositions if formulated as a multi-dose.

[0836] Pharmaceutically acceptable excipients used in the parenteral preparations described herein include for example, aqueous vehicles, nonaqueous vehicles, antimicrobial agents, isotonic agents, buffers, antioxidants, local anesthetics, suspending and dispersing agents, emulsifying agents, sequestering or chelating agents or other pharmaceutically acceptable substances. Examples of aqueous vehicles, which can be incorporated in one or more of the formulations described herein, include sodium chloride injection, Ringer's injection, isotonic dextrose injection, sterile water injection, dextrose or lactated Ringer's injection. Nonaqueous parenteral vehicles, which can be incorporated in one or more of the formulations described herein, include fixed oils of vegetable origin, cottonseed oil, corn oil, sesame oil or peanut oil. Antimicrobial agents in bacteriostatic or fungistatic concentrations can be added to the parenteral preparations described herein and packaged in multiple-dose containers, which include phenols or cresols, mercurials, benzyl alcohol, chlorobutanol, methyl and propyl p-hydroxybenzoic acid esters, thimerosal, benzalkonium chloride or benzethonium chloride. Isotonic agents, which can be incorporated in one or more of the formulations described herein, include sodium chloride or dextrose. Buffers, which can be incorporated in one or more of the formulations described herein, include phosphate or citrate. Antioxidants, which can be incorporated in one or more of the formulations described herein, include sodium bisulfate. Local anesthetics, which can be incorporated in one or more of the formulations described herein, include procaine hydrochloride. Suspending and dispersing agents, which can be incorporated in one or more of the formulations described herein, include sodium carboxymethylcelluose, hydroxypropyl methylcellulose or polyvinylpyrrolidone. Emulsifying agents, which can be incorporated in one or more of the formulations described herein, include Polysorbate 80 (TWEEN® 80). A sequestering or chelating agent of metal ions, which can be incorporated in one or more of the formulations described herein, is EDTA. Pharmaceutical carriers, which can be incorporated in one or more of the formulations described herein, also include ethyl alcohol, polyethylene glycol or propylene glycol for water miscible vehicles; orsodium hydroxide, hydrochloric acid, citric acid or lactic acid for pH adjustment.

[0837] The precise dose to be employed in a pharmaceutical composition will also depend on the route of administration, and the seriousness of the condition caused by it, and should be decided according to the judgment of the practitioner and each subject's circumstances. For example, effective doses may also vary depending upon means of administration, target site, physiological state of the subject (including age, body weight, and health), other medications administered, or whether therapy is prophylactic or therapeutic. Therapeutic dosages are preferably titrated to optimize safety and efficacy.

### 4.11 Methods of Use

[0838] Provided herein are various methods of utilizing any one more agent described herein (e.g., an RNAi agent, a dsRNA agent, an antisense strand, a sense strand) (see, e.g., §§ 4.2, 4.3); a vector described herein (see, e.g., § 4.6); a conjugate described herein (see, e.g., § 4.4); a carrier described herein (see, e.g., § 4.8); a host cell described herein (see, e.g., § 4.9); and/or a pharmaceutical composition described herein (see, e.g., § 4.10); or any combination thereof.

[0839] In some aspects, the methods described herein comprise administering one or more of the foregoing to a subject. Exemplary subjects include mammals, e.g., humans, non-human mammals, e.g., non-human primates. In some embodiments, the subject is a human.

[0840] The dosage of any of the foregoing, to be administered to a subject in accordance with any of the methods described herein can be determined in accordance with standard techniques known to those of ordinary skill in the art, including the route of administration, the age and weight of the subject.

[0841] In some embodiments, the agent described herein (e.g., an RNAi agent, a dsRNA agent, an antisense strand, a sense strand) (see, e.g., §§ 4.2, 4.3) or a conjugate thereof (see, e.g., § 4.4) is administered to a subject at a dose of from about 1-10 mg/kg, 2-10 mg·kg, 3-10 mg/kg, 4-10 mg/kg, 5-10 mg/kg, 6-10 mg/kg, 7-10 mg/kg, 8-10 mg/kg 9-10 mg/kg, 1-5 mg/kg, 1-4 mg·kg, 1-3 mg/kg, 1-2 mg/kg, 1-2.5 mg/kg, 2-5 mg·kg, 2-4 mg/kg, 2-3 mg/kg, or 2-2.5 mg/kg. In some embodiments, the agent described herein (e.g., an RNAi agent, a dsRNA agent, an antisense strand, a sense strand) (see, e.g., §§ 4.2, 4.3) or a conjugate thereof (see, e.g., § 4.4) is administered to a subject at a dose of about 1 mg/kg, 2 mg/kg, 2.5 mg/kg, 3 mg·kg, 4 mg/kg, 5 mg/kg, 6 mg/kg, 7 mg/kg, 8 mg/kg, 9 mg/kg, or 10 mg/kg. In some embodiments, the agent described herein (e.g., an RNAi agent, a dsRNA agent, an antisense strand, a sense strand) (see, e.g., §§ 4.2, 4.3) or a conjugate thereof (see, e.g., § 4.4) is administered to a subject at least once per month, once per month, at least twice per month, twice per month, at least once a week, or once per week.

### 4.11.1 Methods of Delivery

[0842] Provided herein are, inter alia, various methods of delivering any one more agent described herein (e.g., an RNAi agent, a dsRNA agent, an antisense strand, a sense strand); a vector described herein; a conjugate described herein; a carrier described herein; a host cell described herein; and/or a pharmaceutical composition described herein; or any combination thereof to e.g., a cell, subject, a cell within a subject.

[0843] In one aspect, provided herein are methods of delivering any one more agent described herein (e.g., an RNAi agent, a dsRNA agent, an antisense strand, a sense strand); a vector described herein; a conjugate described herein; a carrier described herein; a host cell described herein; and/or a pharmaceutical composition described herein; or any combination thereof to a cell, the method comprising introducing into a cell any one more agent described herein (e.g., an RNAi agent, a dsRNA agent, an antisense strand, a sense strand); a vector described herein; a conjugate described herein; a carrier described herein; a host cell described herein; and/or a pharmaceutical composition described herein into the cell, to thereby deliver the agent (e.g., RNAi agent, dsRNA agent, antisense strand, sense strand), conjugate, vector, carrier, or pharmaceutical composition into the cell. In some embodiments, the agent (e.g., RNAi agent, dsRNA agent, antisense strand, sense strand), conjugate, vector, carrier, or pharmaceutical composition is introduced in an amount and for a time sufficient to deliver the agent (e.g., RNAi agent, dsRNA agent, antisense strand, sense strand), conjugate, vector, carrier, or pharmaceutical composition into the cell. In some embodiments, the cell is in vitro, ex vivo, or in vivo. In some embodiments, the cell is in vitro or ex vivo. In some embodiments, the cell is in vitro. In some embodiments, the cell is ex vivo. In some embodiments, the cell is in vivo.

[0844] In one aspect, provided herein are methods of delivering any one more agent described herein (e.g., an RNAi agent, a dsRNA agent, an antisense strand, a sense strand); a vector described herein; a conjugate described herein; a carrier described herein; a host cell described herein; and/or a pharmaceutical composition described herein; or any combination thereof to a subject, the method comprising administering to a subject any one more agent described herein (e.g., an RNAi agent, a dsRNA agent, an antisense strand, a sense strand); a vector described herein; a conjugate described herein; a carrier described herein; a host cell described herein; and/or a pharmaceutical composition described herein into the cell, to thereby deliver the agent (e.g., RNAi agent, dsRNA agent, antisense strand, sense strand), conjugate, vector, carrier, or pharmaceutical composition to the subject. In some embodiments, the agent (e.g., RNAi agent, dsRNA agent, antisense strand, sense strand), conjugate, vector, carrier, or pharmaceutical composition is administered in an amount and for a time sufficient to deliver the agent (e.g., RNAi agent, dsRNA agent, antisense strand, sense strand), conjugate, vector, carrier, or pharmaceutical composition to the subject.

[0845] In one aspect, provided herein are methods of delivering any one more agent described herein (e.g., an RNAi agent, a dsRNA agent, an antisense strand, a sense strand); a vector described herein; a conjugate described herein; a carrier described herein; a host cell described herein; and/or a pharmaceutical composition described herein; or any combination thereof to a cell within a subject, the method comprising administering to a cell within a subject any one more agent described herein (e.g., an RNAi agent, a dsRNA agent, an antisense strand, a sense strand); a vector described herein; a conjugate described herein; a carrier described herein; a host cell described herein; and/or a pharmaceutical composition described herein into the cell, to thereby deliver the agent (e.g., RNAi agent, dsRNA agent, antisense strand, sense strand), conjugate, vector, carrier, or pharmaceutical composition to the cell within the subject. In some embodiments, the agent (e.g., RNAi agent, dsRNA agent, antisense strand, sense strand), conjugate, vector, carrier, or pharmaceutical composition is administered in an amount and for a time sufficient to deliver the agent (e.g., RNAi agent, dsRNA agent, antisense strand, sense strand), conjugate, vector, carrier, or pharmaceutical composition to the cell within the subject.

### 4.11.2 Methods of Reducing or Inhibiting CIDEB Expression

[0846] In one aspect, provided herein are methods of reducing or inhibiting expression of CIDEB (e.g., hCIDEB) in a cell, the method comprising introducing into the cell any one more agent described herein (e.g., an RNAi agent, a dsRNA agent, an antisense strand, a sense strand); a vector described herein; a conjugate described herein; a carrier described herein; a host cell described herein; and/or a pharmaceutical composition described herein, to thereby reduce or inhibit expression of CIDEB (e.g., hCIDEB) in the cell. In some embodiments, the agent (e.g., RNAi agent, dsRNA agent, antisense strand, sense strand), conjugate, vector, carrier, or pharmaceutical composition is introduced in an amount and for a time sufficient to reduce or inhibit expression of CIDEB (e.g., hCIDEB) in the cell. In some embodiments, the cell is in vitro, ex vivo, or in vivo. In some embodiments, the cell is in vitro or ex vivo. In some embodiments, the cell is in vitro. In some embodiments, the cell is ex vivo. In some embodiments, the cell is in vivo.

[0847] In some embodiments, the level of CIDEB (e.g., hCIDEB) expression in the cell is reduced by at least about 30%, 40%, 50%, 55%, 60%, 65%, 70%, 75%, 80%, 85%, 90%, 95%, 96%, 97%, 98%, 99%, or 100% (e.g., as compared to suitable control) (e.g., as measured by an assay known in the art or described herein, e.g., qPCR). In some embodiments, the level of CIDEB (e.g., hCIDEB) expression in the cell is reduced by at least about 50% (e.g., as compared to suitable control) (e.g., as measured by an assay known in the art or described herein, e.g., qPCR). In some embodiments, the level of CIDEB (e.g., hCIDEB) expression in the cell is reduced by at least about 75% (e.g., as compared to suitable control) (e.g., as measured by an assay known in the art or described herein, e.g., qPCR). In some embodiments, the level of CIDEB (e.g., hCIDEB) expression in the cell is reduced by at least about 80% (e.g., as compared to suitable control) (e.g., as measured by an assay known in the art or described herein, e.g., qPCR). In some embodiments, the level of CIDEB (e.g., hCIDEB) expression in the cell is reduced by at least about 90% (e.g., as compared to suitable control) (e.g., as measured by an assay known in the art or described herein, e.g., qPCR). In some embodiments, the level of CIDEB (e.g., hCIDEB) expression in the cell is reduced by at least about 95% (e.g., as compared to suitable control) (e.g., as measured by an assay known in the art or described herein, e.g., qPCR).

[0848] In one aspect, provided herein are methods of reducing or inhibiting expression of CIDEB (e.g., hCIDEB) in a cell in a subject, the method comprising administering to a subject any one more agent described herein (e.g., an RNAi agent, a dsRNA agent, an antisense strand, a sense strand); a vector described herein; a conjugate described herein; a carrier described herein; a host cell described herein; and/or a pharmaceutical composition described herein, to thereby reduce or inhibit expression of CIDEB (e.g., hCIDEB) in the cell in the subject. In some embodiments, the agent (e.g., RNAi agent, dsRNA agent, antisense strand, sense strand), conjugate, vector, carrier, or pharmaceutical composition is administered to the subject in an amount and for a time sufficient to reduce or inhibit expression of CIDEB (e.g., hCIDEB) in the cell in the subject. In some embodiments, the level of CIDEB (e.g., hCIDEB) expression in the cell is reduced by at least about 30%, 40%, 50%, 55%, 60%, 65%, 70%, 75%, 80%, 85%, 90%, 95%, 96%, 97%, 98%, 99%, or 100% (e.g., as compared to suitable control) (e.g., as measured by an assay known in the art or described herein, e.g., qPCR).

[0849] In one aspect, provided herein are dsRNA agents, conjugates, vectors, carriers, and pharmaceutical compositions for use in a method of reducing or inhibiting expression of CIDEB (e.g., hCIDEB) in a cell in a subject. In some embodiments, the agent (e.g., RNAi agent, dsRNA agent, antisense strand, sense strand), conjugate, vector, carrier, or pharmaceutical composition is administered to the subject in an amount and for a time sufficient to reduce or inhibit expression of CIDEB (e.g., hCIDEB) in the cell in the subject. In some embodiments, the level of CIDEB (e.g., hCIDEB) expression in the cell is reduced by at least about 30%, 40%, 50%, 55%, 60%, 65%, 70%, 75%, 80%, 85%, 90%, 95%, 96%, 97%, 98%, 99%, or 100% (e.g., as compared to suitable control) (e.g., as measured by an assay known in the art or described herein, e.g., qPCR).

[0850] In one aspect, provided herein are dsRNA agents, conjugates, vectors, carriers, and pharmaceutical compositions for use in a method of reducing or inhibiting expression of CIDEB (e.g., hCIDEB) in a cell in a subject, the method comprising administering to the subject a dsRNA agent described herein, a conjugate described herein, a vector described herein, a carrier described herein, or a pharmaceutical composition described herein, to thereby reduce or inhibit expression of CIDEB (e.g., hCIDEB) in the cell in the subject. In some embodiments, the agent (e.g., RNAi agent, dsRNA agent, antisense strand, sense strand), conjugate, vector, carrier, or pharmaceutical composition is administered to the subject in an amount and for a time sufficient to reduce or inhibit expression of CIDEB (e.g., hCIDEB) in the cell in the subject. In some embodiments, the level of CIDEB (e.g., hCIDEB) expression in the cell is reduced by at least about 30%, 40%, 50%, 55%, 60%, 65%, 70%, 75%, 80%, 85%, 90%, 95%, 96%, 97%, 98%, 99%, or 100% (e.g., as compared to suitable control) (e.g., as measured by an assay known in the art or described herein, e.g., qPCR).

[0851] In one aspect, provided herein are uses of dsRNA agents, conjugates, vectors, carriers, and pharmaceutical compositions in the manufacture of a medicament for the reduction or inhibition of CIDEB (e.g., hCIDEB) expression in a cell in a subject. In some embodiments, the agent (e.g., RNAi agent, dsRNA agent, antisense strand, sense strand), conjugate, vector, carrier, or pharmaceutical composition is administered to the subject in an amount and for a time sufficient to reduce or inhibit expression of CIDEB (e.g., hCIDEB) in the cell in the subject. In some embodiments, the level of CIDEB (e.g., hCIDEB) expression in the cell is reduced by at least about 30%, 40%, 50%, 55%, 60%, 65%, 70%, 75%, 80%, 85%, 90%, 95%, 96%, 97%, 98%, 99%, or 100% (e.g., as compared to suitable control) (e.g., as measured by an assay known in the art or described herein, e.g., qPCR).

[0852] In one aspect, provided herein are uses of dsRNA agents, conjugates, vectors, carriers, and pharmaceutical compositions in the manufacture of a medicament for use in a method of reducing or inhibiting expression of CIDEB (e.g., hCIDEB) in a cell in a subject, the method comprising administering to the subject a dsRNA agent described herein, a conjugate described herein, a vector described herein, a carrier described herein, or a pharmaceutical composition described herein, to thereby reduce or inhibit expression of CIDEB (e.g., hCIDEB) in the cell in the subject. In some embodiments, the agent (e.g., RNAi agent, dsRNA agent, antisense strand, sense strand), conjugate, vector, carrier, or pharmaceutical composition is administered to the subject in an amount and for a time sufficient to reduce or inhibit expression of CIDEB (e.g., hCIDEB) in the cell in the subject. In some embodiments, the level of CIDEB (e.g., hCIDEB) expression in the cell is reduced by at least about 30%, 40%, 50%, 55%, 60%, 65%, 70%, 75%, 80%, 85%, 90%, 95%, 96%, 97%, 98%, 99%, or 100% (e.g., as compared to suitable control) (e.g., as measured by an assay known in the art or described herein, e.g., qPCR).

### 4.11.3 Methods of Treating, Ameliorating, or Preventing a CIDEB Associated Disease

[0853] In one aspect, provided herein are methods of treating, ameliorating, or preventing a disease in a subject, the method comprising administering to the subject any one more agent described herein (e.g., an RNAi agent, a dsRNA agent, an antisense strand, a sense strand); a vector described herein; a conjugate described herein; a carrier described herein; a host cell described herein; and/or a pharmaceutical composition described herein, to thereby treat, ameliorate, or prevent a disease in the subject. In some embodiments, the agent (e.g., RNAi agent, dsRNA agent, antisense strand, sense strand), conjugate, vector, carrier, or pharmaceutical composition is administered to the subject in an amount and for a time sufficient to treat, ameliorate, or prevent the disease in the subject.

[0854] In one aspect, provided herein are dsRNA agents, conjugates, vectors, carriers, and pharmaceutical compositions for use in a method of treating, ameliorating, or preventing a CIDEB (e.g., hCIDEB) associated disease in a subject. In some embodiments, the agent (e.g., RNAi agent, dsRNA agent, antisense strand, sense strand), conjugate, vector, carrier, or pharmaceutical composition is administered to the subject in an amount and for a time sufficient to treat, ameliorate, or prevent the CIDEB (e.g., hCIDEB) associated disease in the subject.

[0855] In one aspect, provided herein are dsRNA agents, conjugates, vectors, carriers, and pharmaceutical compositions for use in a method of treating, ameliorating, or preventing a CIDEB (e.g., hCIDEB) associated disease in a subject, the method comprising administering to the subject a dsRNA agent described herein, a conjugate described herein, a vector described herein, a carrier described herein, or a pharmaceutical composition described herein, to thereby treat, ameliorate, or prevent the CIDEB (e.g., hCIDEB) associated disease in the subject. In some embodiments, the agent (e.g., RNAi agent, dsRNA agent, antisense strand, sense strand), conjugate, vector, carrier, or pharmaceutical composition is administered to the subject in an amount and for a time sufficient to treat, ameliorate, or prevent the CIDEB (e.g., hCIDEB) associated disease in the subject.

[0856] In one aspect, provided herein are uses of dsRNA agents, conjugates, vectors, carriers, and pharmaceutical compositions in the manufacture of a medicament for the treatment, amelioration, or prevention of a CIDEB (e.g., hCIDEB) associated disease in a subject. In some embodiments, the agent (e.g., RNAi agent, dsRNA agent, antisense strand, sense strand), conjugate, vector, carrier, or pharmaceutical composition is administered to the sub eject in an amount and for a time sufficient to treat, ameliorate, or prevent the CIDEB (e.g., hCIDEB) associated disease in the subject.

[0857] In one aspect, provided herein are uses of dsRNA agents, conjugates, vectors, carriers, and pharmaceutical compositions in the manufacture of a medicament for use in a method of treating, ameliorating, or preventing a CIDEB (e.g., hCIDEB) associated disease in a subject, the method comprising administering to the subject a dsRNA agent described herein, a conjugate described herein, a vector described herein, a carrier described herein, or a pharmaceutical composition described herein, to thereby treat, ameliorate, or prevent the CIDEB (e.g., hCIDEB) associated disease in the subject. In some embodiments, the agent (e.g., RNAi agent, dsRNA agent, antisense strand, sense strand), conjugate, vector, carrier, or pharmaceutical composition is administered to the subject in an amount and for a time sufficient to treat, ameliorate, or prevent the CIDEB (e.g., hCIDEB) associated disease in the subject.

[0858] In one aspect, provided herein are dsRNA agents, conjugates, vectors, carriers, and pharmaceutical compositions for use in treating a disease in a subject, preferably a CIDEB (e.g., hCIDEB) associated disease, more preferably a liver disease.

[0859] In one aspect, provided herein are methods of treating, ameliorating, or preventing a CIDEB (e.g., hCIDEB) associated disease in a subject, the method comprising administering to the subject any one more agent described herein (e.g., an RNAi agent, a dsRNA agent, an antisense strand, a sense strand); a vector described herein; a conjugate described herein; a carrier described herein; a host cell described herein; and/or a pharmaceutical composition described herein, to thereby treat, ameliorate, or prevent the CIDEB (e.g., hCIDEB) associated disease in the subject. In some embodiments, the agent (e.g., RNAi agent, dsRNA agent, antisense strand, sense strand), conjugate, vector, carrier, or pharmaceutical composition is administered to the subject in an amount and for a time sufficient to treat, ameliorate, or prevent the CIDEB (e.g., hCIDEB) associated disease in the subject.

[0860] The following applicable to any of the foregoing methods, in specific embodiments, the treating, ameliorating, or preventing of the CIDEB associated disease is mediated (at least in part) by reducing or inhibiting expression of CIDEB (e.g., hCIDEB) in the subject (e.g., a population of cells within the subject).

[0861] The following applicable to any of the foregoing methods, in some embodiments, the CIDEB associated disease is fatty liver disease, liver inflammation, nonalcoholic steatohepatitis (NASH), nonalcoholic fatty liver disease (NAFLD), obesity-induced metabolic syndrome, insulin insensitivity, obesity, type-2 diabetes, alcoholic fatty liver disease (AFLD), cirrhosis, metabolic dysfunction associated steatotic liver disease (MASLD), metabolic-associated steatohepatitis (MASH), metabolic dysfunction associated fatty liver disease (MAFLD), metabolic dysfunction and alcohol associated steatotic liver disease (MetALD), steatotic liver disease (SLD), cryptogenic SLD, liver fibrosis, liver failure, jaundice, a liver infection (e.g., hepatitis C infection, hepatitis B infection), or a cardiovascular disease (e.g., atherosclerosis, coronary artery disease, myocardial infarction, or heart failure).

[0862] In specific embodiments, the CIDEB associated disease is fatty liver disease, liver inflammation, NASH or NAFLD. In specific embodiments, the CIDEB associated disease is obesity-induced metabolic syndrome, insulin insensitivity, obesity, type-2 diabetes, AFLD, or cirrhosis. In specific embodiments, the CIDEB associated disease is MASLD, MASH, MAFLD, MetALD, SLD, or cryptogenic SLD. See, e.g., Rinella M. et al., A multisociety Delphi consensus statement on new fatty liver disease nomenclature, Hepatology 78(6):p 1966-1986 December 2023, the entire contents of which is incorporated herein by reference for all purposes. In specific embodiments, the CIDEB associated disease is the liver fibrosis, liver inflammation, cirrhosis, liver failure, or jaundice. In specific embodiments, the disease is obesity or type-2 diabetes. In specific embodiments, the CIDEB associated disease is a liver infection (e.g., hepatitis C infection, hepatitis B infection). In specific embodiments, the liver infection is a hepatitis infection. In specific embodiments, the hepatitis infection is a hepatitis C infection or hepatitis B infection. In specific embodiments, the CIDEB associated disease is a cardiovascular disease (e.g., atherosclerosis, coronary artery disease, myocardial infarction, or heart failure). In specific embodiments, the cardiovascular disease is atherosclerosis, coronary artery disease, myocardial infarction, or heart failure. In specific embodiments, the CIDEB associated disease is atherosclerosis, coronary artery disease, myocardial infarction, or heart failure.

[0863] In specific embodiments, the CIDEB associated disease is fatty liver disease, steatotic liver disease, liver inflammation, NASH, NAFLD, MASLD, MASH, MAFLD, MetALD, SLD, or cryptogenic SLD.

### 4.11.4 Methods of Treating, Ameliorating, or Preventing a Liver Disease

[0864] In one aspect, provided herein are methods of treating, ameliorate, or preventing a liver disease in a subject, the method comprising administering to the subject any one more agent described herein (e.g., an RNAi agent, a dsRNA agent, an antisense strand, a sense strand); a vector described herein; a conjugate described herein; a carrier described herein; a host cell described herein; and/or a pharmaceutical composition described herein, to thereby treat, ameliorate, or prevent the liver disease in the subject. In some embodiments, the agent (e.g., RNAi agent, dsRNA agent, antisense strand, sense strand), conjugate, vector, carrier, or pharmaceutical composition is administered to the subject in an amount and for a time sufficient to treat, ameliorate, or prevent the liver disease in the subject.

[0865] In one aspect, provided herein are dsRNA agents, conjugates, vectors, carriers, and pharmaceutical compositions for use in a method of treating, ameliorating, or preventing a liver disease in a subject. In some embodiments, the agent (e.g., RNAi agent, dsRNA agent, antisense strand, sense strand), conjugate, vector, carrier, or pharmaceutical composition is administered to the subject in an amount and for a time sufficient to treat, ameliorate, or prevent the liver disease in the subject.

[0866] In one aspect, provided herein are dsRNA agents, conjugates, vectors, carriers, and pharmaceutical compositions for use in a method of treating, ameliorating, or preventing a liver disease in a subject, the method comprising administering to the subject a dsRNA agent described herein, a conjugate described herein, a vector described herein, a carrier described herein, or a pharmaceutical composition described herein, to thereby treat, ameliorate, or prevent the liver disease in the subject. In some embodiments, the agent (e.g., RNAi agent, dsRNA agent, antisense strand, sense strand), conjugate, vector, carrier, or pharmaceutical composition is administered to the subject in an amount and for a time sufficient to treat, ameliorate, or prevent the liver disease in the subject.

[0867] In one aspect, provided herein are uses of dsRNA agents, conjugates, vectors, carriers, and pharmaceutical compositions in the manufacture of a medicament for the treatment, amelioration, or prevention of a liver disease in a subject. In some embodiments, the agent (e.g., RNAi agent, dsRNA agent, antisense strand, sense strand), conjugate, vector, carrier, or pharmaceutical composition is administered to the subject in an amount and for a time sufficient to treat, ameliorate, or prevent the liver disease in the subject.

[0868] In one aspect, provided herein are uses of dsRNA agents, conjugates, vectors, carriers, and pharmaceutical compositions in the manufacture of a medicament for use in a method of treating, ameliorating, or preventing a liver disease in a subject, the method comprising administering to the subject a dsRNA agent described herein, a conjugate described herein, a vector described herein, a carrier described herein, or a pharmaceutical composition described herein, to thereby treat, ameliorate, or prevent the liver disease in the subject. In some embodiments, the agent (e.g., RNAi agent, dsRNA agent, antisense strand, sense strand), conjugate, vector, carrier, or pharmaceutical composition is administered to the subject in an amount and for a time sufficient to treat, ameliorate, or prevent the liver disease in the subject.

[0869] The following applicable to any of the foregoing methods, in specific embodiments, the treating, ameliorating, or preventing of the liver disease is mediated (at least in part) by reducing or inhibiting expression of CIDEB (e.g., hCIDEB) in the subject (e.g., a population of cells within the subject).

[0870] The following applicable to any of the foregoing aspects, in some embodiments, the liver disease is fatty liver disease, liver inflammation, nonalcoholic steatohepatitis (NASH), nonalcoholic fatty liver disease (NAFLD), obesity-induced metabolic syndrome, insulin insensitivity, obesity, type-2 diabetes, alcoholic fatty liver disease (AFLD), cirrhosis, metabolic dysfunction associated steatotic liver disease (MASLD), metabolic-associated steatohepatitis (MASH), metabolic dysfunction associated fatty liver disease (MAFLD), metabolic dysfunction and alcohol associated steatotic liver disease (MetALD), steatotic liver disease (SLD), cryptogenic SLD, liver fibrosis, liver failure, jaundice, a liver infection (e.g., hepatitis C infection, hepatitis B infection), or a cardiovascular disease (e.g., atherosclerosis, coronary artery disease, myocardial infarction, or heart failure).

[0871] In specific embodiments, the liver disease is fatty liver disease, liver inflammation, NASH or NAFLD. In specific embodiments, the liver disease is obesity-induced metabolic syndrome, insulin insensitivity, obesity, type-2 diabetes, AFLD, or cirrhosis. In specific embodiments, the liver disease is MASLD, MASH, MAFLD, MetALD, SLD, or cryptogenic SLD. See, e.g., Rinella M. et al., A multisociety Delphi consensus statement on new fatty liver disease nomenclature, Hepatology 78(6): p 1966-1986 December 2023, the entire contents of which is incorporated herein by reference for all purposes. In specific embodiments, the liver disease is the liver fibrosis, liver inflammation, cirrhosis, liver failure, or jaundice. In specific embodiments, the disease is obesity or type-2 diabetes. In specific embodiments, the liver disease is a liver infection (e.g., hepatitis C infection, hepatitis B infection). In specific embodiments, the liver infection is a hepatitis infection. In specific embodiments, the hepatitis infection is a hepatitis C infection or hepatitis B infection. In specific embodiments, the liver disease is a cardiovascular disease (e.g., atherosclerosis, coronary artery disease, myocardial infarction, or heart failure). In specific embodiments, the cardiovascular disease is atherosclerosis, coronary artery disease, myocardial infarction, or heart failure. In specific embodiments, the liver disease is atherosclerosis, coronary artery disease, myocardial infarction, or heart failure.

[0872] In specific embodiments, the liver disease is fatty liver disease, steatotic liver disease, liver inflammation, NASH, NAFLD, MASLD, MASH, MAFLD, MetALD, SLD, or cryptogenic SLD.

4.11.5 Methods of Diagnosing and/or Prognosticating a Liver Disease

[0873] In one aspect, provided herein are methods of diagnosing a liver disease in a subject, the method comprising (a) isolating and purifying DNA, RNA, or protein, or having DNA, RNA, or protein isolated and purified, from a sample obtained from the subject; (b) detecting, or having detected, the presence or absence of one or more somatic CIDEB mutation in the DNA, RNA, or protein, wherein the presence of the somatic mutation indicates that the subject has a liver disease.

[0874] In some embodiments, (a) comprises isolating and purifying DNA, or having DNA isolated and purified, from a sample obtained from the subject; and (b) comprises detecting, or having detected, the presence or absence of one or more somatic CIDEB mutation in the DNA. In some embodiments, (a) comprises isolating and purifying RNA, or having RNA isolated and purified, from a sample obtained from the subject; and (b) comprises detecting, or having detected, the presence or absence of one or more somatic CIDEB mutation in the RNA. In some embodiments, (a) comprises isolating and purifying protein, or having protein isolated and purified, from a sample obtained from the subject; and (b) comprises detecting, or having detected, the presence or absence of one or more somatic CIDEB mutation in the protein.

[0875] In some embodiments, the method further comprises (c) administering to the subject an inhibitory nucleic acid molecule that inhibits expression of CIDEB if one or more somatic CIDEB mutation is detected in the DNA, RNA, or protein. In some embodiments, the inhibitory nucleic acid molecule comprises one or more RNA agent described herein (e.g., an RNAi agent, a dsRNA agent, an antisense strand, a sense strand, an siRNA agent, an antisense oligonucleotide) (or a vector comprising or encoding the RNA agent described herein, e.g., a vector described herein; a conjugate comprising the RNA agent described herein, e.g., a conjugate described herein; a carrier comprising the RNA agent described herein (or a vector or conjugate comprising the same), e.g., a carrier described herein; and/or a pharmaceutical composition comprising the RNA agent described herein (or a vector, conjugate, or carrier comprising the same), e.g., a pharmaceutical composition described herein). In some embodiments, the RNA agent is a dsRNA agent described herein comprising a sense strand and an antisense strand.

[0876] In some embodiments, the method further comprises (c) withholding administration of an inhibitory nucleic acid molecule that inhibits expression of CIDEB to the subject if one or more somatic CIDEB mutation is not detected in the DNA, RNA, or protein. In some embodiments, the method further comprises (c) administering an alternative therapeutic agent for treatment of the disease that is not an inhibitory nucleic acid molecule that inhibits expression of CIDEB to the subject if a somatic CIDEB mutation in the sample is not detected. In some embodiments, the different therapeutic agent is a standard of care agent for the disease.

[0877] In some embodiments, the subject is undergoing or has undergone treatment with a different therapeutic agent for the disease that is not an inhibitory nucleic acid molecule that inhibits expression of CIDEB and/or function of CIDEB. In some embodiments, the treatment with the different therapeutic agent is discontinued if a somatic CIDEB mutation in the sample is detected and/or the inhibitory nucleic acid molecule that inhibits expression of CIDEB is administered to the subject.

[0878] In one aspect, provided herein are methods of diagnosing and/or prognosticating a liver disease in a subject, the method comprising (a) isolating and purifying DNA, RNA, or protein, or having DNA, RNA, or protein isolated and purified, from a sample obtained from the subject; (b) detecting, or having detected, the presence or absence of one or more somatic CIDEB mutation in the DNA, RNA, or protein, wherein the presence of the somatic mutation indicates that the subject has a liver disease, is at risk of developing a liver disease, is at risk of developing a more severe form of a liver disease, and/or is at risk of developing a disease associated with a liver disease.

[0879] In some embodiments, (a) comprises isolating and purifying DNA, or having DNA isolated and purified, from a sample obtained from the subject; and (b) comprises detecting, or having detected, the presence or absence of one or more somatic CIDEB mutation in the DNA. In some embodiments, (a) comprises isolating and purifying RNA, or having RNA isolated and purified, from a sample obtained from the subject; and (b) comprises detecting, or having detected, the presence or absence of one or more somatic CIDEB mutation in the RNA. In some embodiments, (a) comprises isolating and purifying protein, or having protein isolated and purified, from a sample obtained from the subject; and (b) comprises detecting, or having detected, the presence or absence of one or more somatic CIDEB mutation in the protein.

[0880] In some embodiments, the method further comprises (c) administering to the subject an agent (e.g., inhibitory nucleic acid molecule (e.g., an RNA agent (e.g., a dsRNA agent described herein)) that inhibits expression of CIDEB if one or more somatic CIDEB mutation is detected in the DNA, RNA, or protein. In some embodiments, the inhibitory nucleic acid molecule comprises one or more RNA agent described herein (e.g., an RNAi agent, a dsRNA agent, an antisense strand, a sense strand, an siRNA agent, an antisense oligonucleotide) (or a vector comprising or encoding the RNA agent described herein, e.g., a vector described herein; a conjugate comprising the RNA agent described herein, e.g., a conjugate described herein; a carrier comprising the RNA agent described herein (or a vector or conjugate comprising the same), e.g., a carrier described herein; and/or a pharmaceutical composition comprising the RNA agent described herein (or a vector, conjugate, or carrier comprising the same), e.g., a pharmaceutical composition described herein). In some embodiments, the RNA agent is a dsRNA agent described herein comprising a sense strand and an antisense strand.

[0881] In some embodiments, the method further comprises (c) withholding administration of an inhibitory nucleic acid molecule that inhibits expression of CIDEB to the subject if one or more somatic CIDEB mutation is not detected in the DNA, RNA, or protein. In some embodiments, the method further comprises (c) administering an alternative therapeutic agent for treatment of the disease that is not an inhibitory nucleic acid molecule that inhibits expression of CIDEB to the subject if a somatic CIDEB mutation in the sample is not detected. In some embodiments, the different therapeutic agent is a standard of care agent for the disease.

[0882] In some embodiments, the subject is undergoing or has undergone treatment with a different therapeutic agent for the disease that is not an inhibitory nucleic acid molecule that inhibits expression of CIDEB and/or function of CIDEB. In some embodiments, the treatment with the different therapeutic agent is discontinued if a somatic CIDEB mutation in the sample is detected and/or the inhibitory nucleic acid molecule that inhibits expression of CIDEB is administered to the subject.

[0883] In one aspect, provided herein are methods of prognosticating a liver disease in a subject, the method comprising (a) isolating and purifying DNA, RNA, or protein, or having DNA, RNA, or protein isolated and purified, from a sample obtained from the subject; (b) detecting, or having detected, the presence or absence of one or more somatic CIDEB mutation in the DNA, RNA, or protein, wherein the presence of the somatic mutation indicates that the subject is at risk of developing a liver disease, is at risk of developing a more severe form of a liver disease, and/or is at risk of developing a disease associated with a liver disease.

[0884] In some embodiments, (a) comprises isolating and purifying DNA, or having DNA isolated and purified, from a sample obtained from the subject; and (b) comprises detecting, or having detected, the presence or absence of one or more somatic CIDEB mutation in the DNA. In some embodiments, (a) comprises isolating and purifying RNA, or having RNA isolated and purified, from a sample obtained from the subject; and (b) comprises detecting, or having detected, the presence or absence of one or more somatic CIDEB mutation in the RNA. In some embodiments, (a) comprises isolating and purifying protein, or having protein isolated and purified, from a sample obtained from the subject; and (b) comprises detecting, or having detected, the presence or absence of one or more somatic CIDEB mutation in the protein.

[0885] In some embodiments, the method further comprises (c) administering to the subject an agent (e.g., inhibitory nucleic acid molecule (e.g., an RNA agent (e.g., a dsRNA agent described herein)) that inhibits expression of CIDEB if one or more somatic CIDEB mutation is detected in the DNA, RNA, or protein. In some embodiments, the agent comprises a nucleic acid molecule, small molecule, protein, peptide. In some preferred embodiments, the agent is a nucleic acid molecule. In some preferred embodiments, the agent is an inhibitory nucleic acid molecule. In some preferred embodiments, the inhibitory nucleic acid molecule comprises one or more RNA agent described herein (e.g., an RNAi agent, a dsRNA agent, an antisense strand, a sense strand, an siRNA agent, an antisense oligonucleotide) (or a vector comprising or encoding the RNA agent described herein, e.g., a vector described herein; a conjugate comprising the RNA agent described herein, e.g., a conjugate described herein; a carrier comprising the RNA agent described herein (or a vector or conjugate comprising the same), e.g., a carrier described herein; and/or a pharmaceutical composition comprising the RNA agent described herein (or a vector, conjugate, or carrier comprising the same), e.g., a pharmaceutical composition described herein). In some embodiments, the RNA agent is a dsRNA agent described herein comprising a sense strand and an antisense strand.

[0886] In some embodiments, the method further comprises (c) withholding administration of an inhibitory nucleic acid molecule that inhibits expression of CIDEB to the subject if one or more somatic CIDEB mutation is not detected in the DNA, RNA, or protein. In some embodiments, the method further comprises (c) administering an alternative therapeutic agent for treatment of the disease that is not an inhibitory nucleic acid molecule that inhibits expression of CIDEB to the subject if a somatic CIDEB mutation in the sample is not detected. In some embodiments, the different therapeutic agent is a standard of care agent for the disease.

[0887] In some embodiments, the subject is undergoing or has undergone treatment with a different therapeutic agent for the disease that is not an inhibitory nucleic acid molecule that inhibits expression of CIDEB and/or function of CIDEB. In some embodiments, the treatment with the different therapeutic agent is discontinued if a somatic CIDEB mutation in the sample is detected and/or the inhibitory nucleic acid molecule that inhibits expression of CIDEB is administered to the subject.

[0888] The following applicable to any of the foregoing aspects, in some embodiments, the liver disease is fatty liver disease, liver inflammation, nonalcoholic steatohepatitis (NASH), nonalcoholic fatty liver disease (NAFLD), obesity-induced metabolic syndrome, insulin insensitivity, obesity, type-2 diabetes, alcoholic fatty liver disease (AFLD), cirrhosis, metabolic dysfunction associated steatotic liver disease (MASLD), metabolic-associated steatohepatitis (MASH), metabolic dysfunction associated fatty liver disease (MAFLD), metabolic dysfunction and alcohol associated steatotic liver disease (MetALD), steatotic liver disease (SLD), cryptogenic SLD, liver fibrosis, liver failure, jaundice, a liver infection (e.g., hepatitis C infection, hepatitis B infection), or a cardiovascular disease (e.g., atherosclerosis, coronary artery disease, myocardial infarction, or heart failure).

[0889] In specific embodiments, the liver disease is fatty liver disease, liver inflammation, NASH or NAFLD. In specific embodiments, the liver disease is obesity-induced metabolic syndrome, insulin insensitivity, obesity, type-2 diabetes, AFLD, or cirrhosis. In specific embodiments, the liver disease is MASLD, MASH, MAFLD, MetALD, SLD, or cryptogenic SLD. See, e.g., Rinella M. et al., A multisociety Delphi consensus statement on new fatty liver disease nomenclature, Hepatology 78 (6): p 1966-1986 December 2023, the entire contents of which is incorporated herein by reference for all purposes. In specific embodiments, the liver disease is the liver fibrosis, liver inflammation, cirrhosis, liver failure, or jaundice. In specific embodiments, the disease is obesity or type-2 diabetes. In specific embodiments, the liver disease is a liver infection (e.g., hepatitis C infection, hepatitis B infection). In specific embodiments, the liver infection is a hepatitis infection. In specific embodiments, the hepatitis infection is a hepatitis C infection or hepatitis B infection. In specific embodiments, the liver disease is a cardiovascular disease (e.g., atherosclerosis, coronary artery disease, myocardial infarction, or heart failure). In specific embodiments, the cardiovascular disease is atherosclerosis, coronary artery disease, myocardial infarction, or heart failure. In specific embodiments, the liver disease is atherosclerosis, coronary artery disease, myocardial infarction, or heart failure.

[0890] In specific embodiments, the liver disease is fatty liver disease, steatotic liver disease, liver inflammation, NASH, NAFLD, MASLD, MASH, MAFLD, MetALD, SLD, or cryptogenic SLD.

[0891] In specific embodiments, the liver disease is a CIDEB associated disease.

[0892] In some embodiments, the CIDEB associated disease is fatty liver disease, liver inflammation, nonalcoholic steatohepatitis (NASH), nonalcoholic fatty liver disease (NAFLD), obesity-induced metabolic syndrome, insulin insensitivity, obesity, type-2 diabetes, alcoholic fatty liver disease (AFLD), cirrhosis, metabolic dysfunction associated steatotic liver disease (MASLD), metabolic-associated steatohepatitis (MASH), metabolic dysfunction associated fatty liver disease (MAFLD), metabolic dysfunction and alcohol associated steatotic liver disease (MetALD), steatotic liver disease (SLD), cryptogenic SLD, liver fibrosis, liver failure, jaundice, a liver infection (e.g., hepatitis C infection, hepatitis B infection), or a cardiovascular disease (e.g., atherosclerosis, coronary artery disease, myocardial infarction, or heart failure).

[0893] In specific embodiments, the CIDEB associated disease is fatty liver disease, liver inflammation, NASH or NAFLD. In specific embodiments, the CIDEB associated disease is obesity-induced metabolic syndrome, insulin insensitivity, obesity, type-2 diabetes, AFLD, or cirrhosis. In specific embodiments, the CIDEB associated disease is MASLD, MASH, MAFLD, MetALD, SLD, or cryptogenic SLD. See, e.g., Rinella M. et al., A multisociety Delphi consensus statement on new fatty liver disease nomenclature, Hepatology 78(6):p 1966-1986 December 2023, the entire contents of which is incorporated herein by reference for all purposes. In specific embodiments, the CIDEB associated disease is the liver fibrosis, liver inflammation, cirrhosis, liver failure, or jaundice. In specific embodiments, the disease is obesity or type-2 diabetes. In specific embodiments, the CIDEB associated disease is a liver infection (e.g., hepatitis C infection, hepatitis B infection). In specific embodiments, the liver infection is a hepatitis infection. In specific embodiments, the hepatitis infection is a hepatitis C infection or hepatitis B infection. In specific embodiments, the CIDEB associated disease is a cardiovascular disease (e.g., atherosclerosis, coronary artery disease, myocardial infarction, or heart failure). In specific embodiments, the cardiovascular disease is atherosclerosis, coronary artery disease, myocardial infarction, or heart failure. In specific embodiments, the CIDEB associated disease is atherosclerosis, coronary artery disease, myocardial infarction, or heart failure.

[0894] In specific embodiments, the CIDEB associated disease is fatty liver disease, steatotic liver disease, liver inflammation, NASH, NAFLD, MASLD, MASH, MAFLD, MetALD, SLD, or cryptogenic SLD.

4.11.6 Methods of Screening, Identifying, and Selecting a Subject for Treatment with a CIDEB Inhibitory Agent

[0895] In one aspect, provided herein are methods of screening a subject for administration of an inhibitory nucleic acid molecule that inhibits expression of CIDEB, the method comprising (a) isolating and purifying DNA, RNA, or protein, or having DNA, RNA, or protein isolated and purified, from a sample obtained from the subject; (b) detecting, or having detected, the presence or absence of one or more somatic CIDEB mutation in the DNA, RNA, or protein, wherein the subject is selected for administration of an agent (e.g., inhibitory nucleic acid molecule (e.g., an RNA agent (e.g., a dsRNA agent described herein)) that inhibits expression of CIDEB if the somatic mutation is present.

[0896] In some embodiments, (a) comprises isolating and purifying DNA, or having DNA isolated and purified, from a sample obtained from the subject; and (b) comprises detecting, or having detected, the presence or absence of one or more somatic CIDEB mutation in the DNA. In some embodiments, (a) comprises isolating and purifying RNA, or having RNA isolated and purified, from a sample obtained from the subject; and (b) comprises detecting, or having detected, the presence or absence of one or more somatic CIDEB mutation in the RNA. In some embodiments, (a) comprises isolating and purifying protein, or having protein isolated and purified, from a sample obtained from the subject; and (b) comprises detecting, or having detected, the presence or absence of one or more somatic CIDEB mutation in the protein.

[0897] In some embodiments, the agent comprises a nucleic acid molecule, small molecule, protein, peptide. In some preferred embodiments, the agent is a nucleic acid molecule. In some embodiments, the inhibitory nucleic acid molecule comprises one or more RNA agent described herein (e.g., an RNAi agent, a dsRNA agent, an antisense strand, a sense strand, an siRNA agent, an antisense oligonucleotide) (or a vector comprising or encoding the RNA agent described herein, e.g., a vector described herein; a conjugate comprising the RNA agent described herein, e.g., a conjugate described herein; a carrier comprising the RNA agent described herein (or a vector or conjugate comprising the same), e.g., a carrier described herein; and/or a pharmaceutical composition comprising the RNA agent described herein (or a vector, conjugate, or carrier comprising the same), e.g., a pharmaceutical composition described herein). In some embodiments, the RNA agent is a dsRNA agent described herein comprising a sense strand and an antisense strand.

[0898] In some embodiments, the method further comprises (c) administering to the subject an inhibitory nucleic acid molecule that inhibits expression of CIDEB if one or more somatic CIDEB mutation is detected in the DNA, RNA, or protein. In some embodiments, the inhibitory nucleic acid molecule comprises one or more RNA agent described herein (e.g., an RNAi agent, a dsRNA agent, an antisense strand, a sense strand, an siRNA agent, an antisense oligonucleotide) (or a vector comprising or encoding the RNA agent described herein, e.g., a vector described herein; a conjugate comprising the RNA agent described herein, e.g., a conjugate described herein; a carrier comprising the RNA agent described herein (or a vector or conjugate comprising the same), e.g., a carrier described herein; and/or a pharmaceutical composition comprising the RNA agent described herein (or a vector, conjugate, or carrier comprising the same), e.g., a pharmaceutical composition described herein). In some embodiments, the RNA agent is a dsRNA agent described herein comprising a sense strand and an antisense strand.

[0899] In some embodiments, the method further comprises (c) withholding administration of an inhibitory nucleic acid molecule that inhibits expression of CIDEB to the subject if one or more somatic CIDEB mutation is not detected in the DNA, RNA, or protein. In some embodiments, the method further comprises (c) administering an alternative therapeutic agent for treatment of the disease that is not an inhibitory nucleic acid molecule that inhibits expression of CIDEB to the subject if a somatic CIDEB mutation in the sample is not detected. In some embodiments, the different therapeutic agent is a standard of care agent for the disease.

[0900] In some embodiments, the subject is undergoing or has undergone treatment with a different therapeutic agent for the disease that is not an inhibitory nucleic acid molecule that inhibits expression of CIDEB and/or function of CIDEB. In some embodiments, the treatment with the different therapeutic agent is discontinued if a somatic CIDEB mutation in the sample is detected and/or the inhibitory nucleic acid molecule that inhibits expression of CIDEB is administered to the subject.

[0901] In one aspect, provided herein are methods of selecting a subject for administration of an inhibitory nucleic acid molecule that inhibits expression of CIDEB, the method comprising (a) isolating and purifying DNA, RNA, or protein, or having DNA, RNA, or protein isolated and purified, from a sample obtained from the subject; (b) detecting, or having detected, the presence or absence of one or more somatic CIDEB mutation in the DNA, RNA, or protein, wherein the subject is selected for administration of an agent (e.g., inhibitory nucleic acid molecule (e.g., an RNA agent (e.g., a dsRNA agent described herein)) that inhibits expression of CIDEB if the somatic mutation is present.

[0902] In some embodiments, (a) comprises isolating and purifying DNA, or having DNA isolated and purified, from a sample obtained from the subject; and (b) comprises detecting, or having detected, the presence or absence of one or more somatic CIDEB mutation in the DNA. In some embodiments, (a) comprises isolating and purifying RNA, or having RNA isolated and purified, from a sample obtained from the subject; and (b) comprises detecting, or having detected, the presence or absence of one or more somatic CIDEB mutation in the RNA. In some embodiments, (a) comprises isolating and purifying protein, or having protein isolated and purified, from a sample obtained from the subject; and (b) comprises detecting, or having detected, the presence or absence of one or more somatic CIDEB mutation in the protein.

[0903] In some embodiments, the agent comprises a nucleic acid molecule, small molecule, protein, peptide. In some preferred embodiments, the agent is a nucleic acid molecule. In some embodiments, the inhibitory nucleic acid molecule comprises one or more RNA agent described herein (e.g., an RNAi agent, a dsRNA agent, an antisense strand, a sense strand, an siRNA agent, an antisense oligonucleotide) (or a vector comprising or encoding the RNA agent described herein, e.g., a vector described herein; a conjugate comprising the RNA agent described herein, e.g., a conjugate described herein; a carrier comprising the RNA agent described herein (or a vector or conjugate comprising the same), e.g., a carrier described herein; and/or a pharmaceutical composition comprising the RNA agent described herein (or a vector, conjugate, or carrier comprising the same), e.g., a pharmaceutical composition described herein). In some embodiments, the RNA agent is a dsRNA agent described herein comprising a sense strand and an antisense strand.

[0904] In some embodiments, the method further comprises (c) administering to the subject an inhibitory nucleic acid molecule that inhibits expression of CIDEB if one or more somatic CIDEB mutation is detected in the DNA, RNA, or protein. In some embodiments, the inhibitory nucleic acid molecule comprises one or more RNA agent described herein (e.g., an RNAi agent, a dsRNA agent, an antisense strand, a sense strand, an siRNA agent, an antisense oligonucleotide) (or a vector comprising or encoding the RNA agent described herein, e.g., a vector described herein; a conjugate comprising the RNA agent described herein, e.g., a conjugate described herein; a carrier comprising the RNA agent described herein (or a vector or conjugate comprising the same), e.g., a carrier described herein; and/or a pharmaceutical composition comprising the RNA agent described herein (or a vector, conjugate, or carrier comprising the same), e.g., a pharmaceutical composition described herein). In some embodiments, the RNA agent is a dsRNA agent described herein comprising a sense strand and an antisense strand.

[0905] In some embodiments, the method further comprises (c) withholding administration of an inhibitory nucleic acid molecule that inhibits expression of CIDEB to the subject if one or more somatic CIDEB mutation is not detected in the DNA, RNA, or protein. In some embodiments, the method further comprises (c) administering an alternative therapeutic agent for treatment of the disease that is not an inhibitory nucleic acid molecule that inhibits expression of CIDEB to the subject if a somatic CIDEB mutation in the sample is not detected. In some embodiments, the different therapeutic agent is a standard of care agent for the disease.

[0906] In some embodiments, the subject is undergoing or has undergone treatment with a different therapeutic agent for the disease that is not an inhibitory nucleic acid molecule that inhibits expression of CIDEB and/or function of CIDEB. In some embodiments, the treatment with the different therapeutic agent is discontinued if a somatic CIDEB mutation in the sample is detected and/or the inhibitory nucleic acid molecule that inhibits expression of CIDEB is administered to the subject.

[0907] In one aspect, provided herein are methods of identifying a subject for administration of an inhibitory nucleic acid molecule that inhibits expression of CIDEB, the method comprising (a) isolating and purifying DNA, RNA, or protein, or having DNA, RNA, or protein isolated and purified, from a sample obtained from the subject; (b) detecting, or having detected, the presence or absence of one or more somatic CIDEB mutation in the DNA, RNA, or protein, wherein the presence of the somatic mutation indicates that the subject is identified for administration of an agent (e.g., inhibitory nucleic acid molecule (e.g., an RNA agent (e.g., a dsRNA agent described herein)) that inhibits expression of CIDEB.

[0908] In some embodiments, (a) comprises isolating and purifying DNA, or having DNA isolated and purified, from a sample obtained from the subject; and (b) comprises detecting, or having detected, the presence or absence of one or more somatic CIDEB mutation in the DNA. In some embodiments, (a) comprises isolating and purifying RNA, or having RNA isolated and purified, from a sample obtained from the subject; and (b) comprises detecting, or having detected, the presence or absence of one or more somatic CIDEB mutation in the RNA. In some embodiments, (a) comprises isolating and purifying protein, or having protein isolated and purified, from a sample obtained from the subject; and (b) comprises detecting, or having detected, the presence or absence of one or more somatic CIDEB mutation in the protein.

[0909] In some embodiments, the agent comprises a nucleic acid molecule, small molecule, protein, peptide. In some preferred embodiments, the agent is a nucleic acid molecule. In some preferred embodiments, the agent is an inhibitory nucleic acid molecule. In some preferred embodiments, the inhibitory nucleic acid molecule comprises one or more RNA agent described herein (e.g., an RNAi agent, a dsRNA agent, an antisense strand, a sense strand, an siRNA agent, an antisense oligonucleotide) (or a vector comprising or encoding the RNA agent described herein, e.g., a vector described herein; a conjugate comprising the RNA agent described herein, e.g., a conjugate described herein; a carrier comprising the RNA agent described herein (or a vector or conjugate comprising the same), e.g., a carrier described herein; and/or a pharmaceutical composition comprising the RNA agent described herein (or a vector, conjugate, or carrier comprising the same), e.g., a pharmaceutical composition described herein). In some embodiments, the RNA agent is a dsRNA agent described herein comprising a sense strand and an antisense strand.

[0910] In some embodiments, the method further comprises (c) administering to the subject an inhibitory nucleic acid molecule that inhibits expression of CIDEB if one or more somatic CIDEB mutation is detected in the DNA, RNA, or protein. In some embodiments, the inhibitory nucleic acid molecule comprises one or more RNA agent described herein (e.g., an RNAi agent, a dsRNA agent, an antisense strand, a sense strand, an siRNA agent, an antisense oligonucleotide) (or a vector comprising or encoding the RNA agent described herein, e.g., a vector described herein; a conjugate comprising the RNA agent described herein, e.g., a conjugate described herein; a carrier comprising the RNA agent described herein (or a vector or conjugate comprising the same), e.g., a carrier described herein; and/or a pharmaceutical composition comprising the RNA agent described herein (or a vector, conjugate, or carrier comprising the same), e.g., a pharmaceutical composition described herein). In some embodiments, the RNA agent is a dsRNA agent described herein comprising a sense strand and an antisense strand.

[0911] In some embodiments, the method further comprises (c) withholding administration of an inhibitory nucleic acid molecule that inhibits expression of CIDEB to the subject if one or more somatic CIDEB mutation is not detected in the DNA, RNA, or protein. In some embodiments, the method further comprises (c) administering an alternative therapeutic agent for treatment of the disease that is not an inhibitory nucleic acid molecule that inhibits expression of CIDEB to the subject if a somatic CIDEB mutation in the sample is not detected. In some embodiments, the different therapeutic agent is a standard of care agent for the disease.

[0912] In some embodiments, the subject is undergoing or has undergone treatment with a different therapeutic agent for the disease that is not an inhibitory nucleic acid molecule that inhibits expression of CIDEB and/or function of CIDEB. In some embodiments, the treatment with the different therapeutic agent is discontinued if a somatic CIDEB mutation in the sample is detected and/or the inhibitory nucleic acid molecule that inhibits expression of CIDEB is administered to the subject.

[0913] In one aspect, provided herein are methods of identifying a subject having a disease who is likely to respond to treatment with an inhibitory nucleic acid molecule that inhibits expression of CIDEB, the method comprising (a) isolating and purifying DNA, RNA, or protein, or having DNA, RNA, or protein isolated and purified, from a sample obtained from the subject; (b) detecting, or having detected, the presence or absence of one or more somatic CIDEB mutation in the DNA, RNA, or protein, wherein the subject is identified as a subject likely to respond to treatment with an agent (e.g., inhibitory nucleic acid molecule (e.g., an RNA agent (e.g., a dsRNA agent described herein)) that inhibits expression of CIDEB if the somatic mutation is present.

[0914] In some embodiments, (a) comprises isolating and purifying DNA, or having DNA isolated and purified, from a sample obtained from the subject; and (b) comprises detecting, or having detected, the presence or absence of one or more somatic CIDEB mutation in the DNA. In some embodiments, (a) comprises isolating and purifying RNA, or having RNA isolated and purified, from a sample obtained from the subject; and (b) comprises detecting, or having detected, the presence or absence of one or more somatic CIDEB mutation in the RNA. In some embodiments, (a) comprises isolating and purifying protein, or having protein isolated and purified, from a sample obtained from the subject; and (b) comprises detecting, or having detected, the presence or absence of one or more somatic CIDEB mutation in the protein.

[0915] In some embodiments, the agent comprises a nucleic acid molecule, small molecule, protein, peptide. In some preferred embodiments, the agent is a nucleic acid molecule. In some embodiments, the inhibitory nucleic acid molecule comprises one or more RNA agent described herein (e.g., an RNAi agent, a dsRNA agent, an antisense strand, a sense strand, an siRNA agent, an antisense oligonucleotide) (or a vector comprising or encoding the RNA agent described herein, e.g., a vector described herein; a conjugate comprising the RNA agent described herein, e.g., a conjugate described herein; a carrier comprising the RNA agent described herein (or a vector or conjugate comprising the same), e.g., a carrier described herein; and/or a pharmaceutical composition comprising the RNA agent described herein (or a vector, conjugate, or carrier comprising the same), e.g., a pharmaceutical composition described herein). In some embodiments, the RNA agent is a dsRNA agent described herein comprising a sense strand and an antisense strand.

[0916] In some embodiments, the method further comprises (c) administering to the subject an inhibitory nucleic acid molecule that inhibits expression of CIDEB if one or more somatic CIDEB mutation is detected in the DNA, RNA, or protein. In some embodiments, the inhibitory nucleic acid molecule comprises one or more RNA agent described herein (e.g., an RNAi agent, a dsRNA agent, an antisense strand, a sense strand, an siRNA agent, an antisense oligonucleotide) (or a vector comprising or encoding the RNA agent described herein, e.g., a vector described herein; a conjugate comprising the RNA agent described herein, e.g., a conjugate described herein; a carrier comprising the RNA agent described herein (or a vector or conjugate comprising the same), e.g., a carrier described herein; and/or a pharmaceutical composition comprising the RNA agent described herein (or a vector, conjugate, or carrier comprising the same), e.g., a pharmaceutical composition described herein). In some embodiments, the RNA agent is a dsRNA agent described herein comprising a sense strand and an antisense strand.

[0917] In some embodiments, the method further comprises (c) withholding administration of an inhibitory nucleic acid molecule that inhibits expression of CIDEB to the subject if one or more somatic CIDEB mutation is not detected in the DNA, RNA, or protein. In some embodiments, the method further comprises (c) administering an alternative therapeutic agent for treatment of the disease that is not an inhibitory nucleic acid molecule that inhibits expression of CIDEB to the subject if a somatic CIDEB mutation in the sample is not detected. In some embodiments, the different therapeutic agent is a standard of care agent for the disease.

[0918] In some embodiments, the subject is undergoing or has undergone treatment with a different therapeutic agent for the disease that is not an inhibitory nucleic acid molecule that inhibits expression of CIDEB and/or function of CIDEB. In some embodiments, the treatment with the different therapeutic agent is discontinued if a somatic CIDEB mutation in the sample is detected and/or the inhibitory nucleic acid molecule that inhibits expression of CIDEB is administered to the subject.

[0919] In one aspect, provided herein are methods of selecting a therapy for a subject having a disease who is likely to respond to treatment with an inhibitory nucleic acid molecule that inhibits expression of CIDEB, the method comprising (a) isolating and purifying DNA, RNA, or protein, or having DNA, RNA, or protein isolated and purified, from a sample obtained from the subject; (b) detecting, or having detected, the presence or absence of one or more somatic CIDEB mutation in the DNA, RNA, or protein, and (c) selecting a therapy for a subject comprising an agent (e.g., inhibitory nucleic acid molecule (e.g., an RNA agent (e.g., a dsRNA agent described herein)) that inhibits expression of CIDEB if the somatic mutation is present.

[0920] In some embodiments, (a) comprises isolating and purifying DNA, or having DNA isolated and purified, from a sample obtained from the subject; and (b) comprises detecting, or having detected, the presence or absence of one or more somatic CIDEB mutation in the DNA. In some embodiments, (a) comprises isolating and purifying RNA, or having RNA isolated and purified, from a sample obtained from the subject; and (b) comprises detecting, or having detected, the presence or absence of one or more somatic CIDEB mutation in the RNA. In some embodiments, (a) comprises isolating and purifying protein, or having protein isolated and purified, from a sample obtained from the subject; and (b) comprises detecting, or having detected, the presence or absence of one or more somatic CIDEB mutation in the protein.

[0921] In some embodiments, the agent comprises a nucleic acid molecule, small molecule, protein, peptide. In some preferred embodiments, the agent is a nucleic acid molecule. In some embodiments, the inhibitory nucleic acid molecule comprises one or more RNA agent described herein (e.g., an RNAi agent, a dsRNA agent, an antisense strand, a sense strand, an siRNA agent, an antisense oligonucleotide) (or a vector comprising or encoding the RNA agent described herein, e.g., a vector described herein; a conjugate comprising the RNA agent described herein, e.g., a conjugate described herein; a carrier comprising the RNA agent described herein (or a vector or conjugate comprising the same), e.g., a carrier described herein; and/or a pharmaceutical composition comprising the RNA agent described herein (or a vector, conjugate, or carrier comprising the same), e.g., a pharmaceutical composition described herein). In some embodiments, the RNA agent is a dsRNA agent described herein comprising a sense strand and an antisense strand.

[0922] In some embodiments, the method further comprises (d) administering to the subject an inhibitory nucleic acid molecule that inhibits expression of CIDEB if one or more somatic CIDEB mutation is detected in the DNA, RNA, or protein. In some embodiments, the inhibitory nucleic acid molecule comprises one or more RNA agent described herein (e.g., an RNAi agent, a dsRNA agent, an antisense strand, a sense strand, an siRNA agent, an antisense oligonucleotide) (or a vector comprising or encoding the RNA agent described herein, e.g., a vector described herein; a conjugate comprising the RNA agent described herein, e.g., a conjugate described herein; a carrier comprising the RNA agent described herein (or a vector or conjugate comprising the same), e.g., a carrier described herein; and/or a pharmaceutical composition comprising the RNA agent described herein (or a vector, conjugate, or carrier comprising the same), e.g., a pharmaceutical composition described herein). In some embodiments, the RNA agent is a dsRNA agent described herein comprising a sense strand and an antisense strand.

[0923] In some embodiments, the method further comprises (d) withholding administration of an inhibitory nucleic acid molecule that inhibits expression of CIDEB to the subject if one or more somatic CIDEB mutation is not detected in the DNA, RNA, or protein. In some embodiments, the method further comprises (d) administering an alternative therapeutic agent for treatment of the disease that is not an inhibitory nucleic acid molecule that inhibits expression of CIDEB to the subject if a somatic CIDEB mutation in the sample is not detected. In some embodiments, the different therapeutic agent is a standard of care agent for the disease.

[0924] In some embodiments, the subject is undergoing or has undergone treatment with a different therapeutic agent for the disease that is not an inhibitory nucleic acid molecule that inhibits expression of CIDEB and/or function of CIDEB. In some embodiments, the treatment with the different therapeutic agent is discontinued if a somatic CIDEB mutation in the sample is detected and/or the inhibitory nucleic acid molecule that inhibits expression of CIDEB is administered to the subject.

[0925] The following applicable to any of the foregoing aspects, in some embodiments, the disease is a liver disease. In some embodiments, the liver disease is fatty liver disease, liver inflammation, nonalcoholic steatohepatitis (NASH), nonalcoholic fatty liver disease (NAFLD), obesity-induced metabolic syndrome, insulin insensitivity, obesity, type-2 diabetes, alcoholic fatty liver disease (AFLD), cirrhosis, metabolic dysfunction associated steatotic liver disease (MASLD), metabolic-associated steatohepatitis (MASH), metabolic dysfunction associated fatty liver disease (MAFLD), metabolic dysfunction and alcohol associated steatotic liver disease (MetALD), steatotic liver disease (SLD), cryptogenic SLD, liver fibrosis, liver failure, jaundice, a liver infection (e.g., hepatitis C infection, hepatitis B infection), or a cardiovascular disease (e.g., atherosclerosis, coronary artery disease, myocardial infarction, or heart failure).

[0926] In specific embodiments, the liver disease is fatty liver disease, liver inflammation, NASH or NAFLD. In specific embodiments, the liver disease is obesity-induced metabolic syndrome, insulin insensitivity, obesity, type-2 diabetes, AFLD, or cirrhosis. In specific embodiments, the liver disease is MASLD, MASH, MAFLD, MetALD, SLD, or cryptogenic SLD. See, e.g., Rinella M. et al., A multisociety Delphi consensus statement on new fatty liver disease nomenclature, Hepatology 78 (6): p 1966-1986 December 2023, the entire contents of which is incorporated herein by reference for all purposes. In specific embodiments, the liver disease is the liver fibrosis, liver inflammation, cirrhosis, liver failure, or jaundice. In specific embodiments, the disease is obesity or type-2 diabetes. In specific embodiments, the liver disease is a liver infection (e.g., hepatitis C infection, hepatitis B infection). In specific embodiments, the liver infection is a hepatitis infection. In specific embodiments, the hepatitis infection is a hepatitis C infection or hepatitis B infection. In specific embodiments, the liver disease is a cardiovascular disease (e.g., atherosclerosis, coronary artery disease, myocardial infarction, or heart failure). In specific embodiments, the cardiovascular disease is atherosclerosis, coronary artery disease, myocardial infarction, or heart failure. In specific embodiments, the liver disease is atherosclerosis, coronary artery disease, myocardial infarction, or heart failure.

[0927] In specific embodiments, the liver disease is fatty liver disease, steatotic liver disease, liver inflammation, NASH, NAFLD, MASLD, MASH, MAFLD, MetALD, SLD, or cryptogenic SLD.

[0928] In specific embodiments, the disease is a CIDEB associated disease.

[0929] In some embodiments, the CIDEB associated disease is fatty liver disease, liver inflammation, nonalcoholic steatohepatitis (NASH), nonalcoholic fatty liver disease (NAFLD), obesity-induced metabolic syndrome, insulin insensitivity, obesity, type-2 diabetes, alcoholic fatty liver disease (AFLD), cirrhosis, metabolic dysfunction associated steatotic liver disease (MASLD), metabolic-associated steatohepatitis (MASH), metabolic dysfunction associated fatty liver disease (MAFLD), metabolic dysfunction and alcohol associated steatotic liver disease (MetALD), steatotic liver disease (SLD), cryptogenic SLD, liver fibrosis, liver failure, jaundice, a liver infection (e.g., hepatitis C infection, hepatitis B infection), or a cardiovascular disease (e.g., atherosclerosis, coronary artery disease, myocardial infarction, or heart failure).

[0930] In specific embodiments, the CIDEB associated disease is fatty liver disease, liver inflammation, NASH or NAFLD. In specific embodiments, the CIDEB associated disease is obesity-induced metabolic syndrome, insulin insensitivity, obesity, type-2 diabetes, AFLD, or cirrhosis. In specific embodiments, the CIDEB associated disease is MASLD, MASH, MAFLD, MetALD, SLD, or cryptogenic SLD. See, e.g., Rinella M. et al., A multisociety Delphi consensus statement on new fatty liver disease nomenclature, Hepatology 78 (6): p 1966-1986 December 2023, the entire contents of which is incorporated herein by reference for all purposes. In specific embodiments, the CIDEB associated disease is the liver fibrosis, liver inflammation, cirrhosis, liver failure, or jaundice. In specific embodiments, the disease is obesity or type-2 diabetes. In specific embodiments, the CIDEB associated disease is a liver infection (e.g., hepatitis C infection, hepatitis B infection). In specific embodiments, the liver infection is a hepatitis infection. In specific embodiments, the hepatitis infection is a hepatitis C infection or hepatitis B infection. In specific embodiments, the CIDEB associated disease is a cardiovascular disease (e.g., atherosclerosis, coronary artery disease, myocardial infarction, or heart failure). In specific embodiments, the cardiovascular disease is atherosclerosis, coronary artery disease, myocardial infarction, or heart failure. In specific embodiments, the CIDEB associated disease is atherosclerosis, coronary artery disease, myocardial infarction, or heart failure.

[0931] In specific embodiments, the CIDEB associated disease is fatty liver disease, steatotic liver disease, liver inflammation, NASH, NAFLD, MASLD, MASH, MAFLD, MetALD, SLD, or cryptogenic SLD.

### 4.11.7 In Vitro Methods of Screening Samples for Somatic CIDEB Mutations

[0932] In one aspect, provided herein are methods of screening a sample from a subject for the presence or absence of one or more somatic CIDEB mutation, the method comprising (a) isolating and purifying DNA, RNA, or protein from a sample obtained from the subject; (b) detecting the presence or absence of one or more somatic CIDEB mutation in the DNA, RNA, or protein.

[0933] In some embodiments, (a) comprises isolating and purifying DNA, or having DNA isolated and purified, from a sample obtained from the subject; and (b) comprises detecting, or having detected, the presence or absence of one or more somatic CIDEB mutation in the DNA. In some embodiments, (a) comprises isolating and purifying RNA, or having RNA isolated and purified, from a sample obtained from the subject; and (b) comprises detecting, or having detected, the presence or absence of one or more somatic CIDEB mutation in the RNA. In some embodiments, (a) comprises isolating and purifying protein, or having protein isolated and purified, from a sample obtained from the subject; and (b) comprises detecting, or having detected, the presence or absence of one or more somatic CIDEB mutation in the protein.

[0934] In some embodiments, the method further comprises (c) administering to the subject an inhibitory nucleic acid molecule that inhibits expression of CIDEB if one or more somatic CIDEB mutation is detected in the DNA, RNA, or protein. In some embodiments, the agent comprises a nucleic acid molecule, small molecule, protein, peptide. In some preferred embodiments, the agent is a nucleic acid molecule. In some embodiments, the inhibitory nucleic acid molecule comprises one or more RNA agent described herein (e.g., an RNAi agent, a dsRNA agent, an antisense strand, a sense strand, an siRNA agent, an antisense oligonucleotide) (or a vector comprising or encoding the RNA agent described herein, e.g., a vector described herein; a conjugate comprising the RNA agent described herein, e.g., a conjugate described herein; a carrier comprising the RNA agent described herein (or a vector or conjugate comprising the same), e.g., a carrier described herein; and/or a pharmaceutical composition comprising the RNA agent described herein (or a vector, conjugate, or carrier comprising the same), e.g., a pharmaceutical composition described herein). In some embodiments, the RNA agent is a dsRNA agent described herein comprising a sense strand and an antisense strand.

[0935] In one aspect, provided herein are methods of characterizing a DNA molecule in a sample from a subject having a disease, the method comprising (a) isolating and purifying DNA (or having DNA isolated and purified) in a sample from the subject; (b) analyzing the DNA (e.g., sequencing at least a portion of the CIDEB gene in the DNA); and (c) determining the presence or absence of a somatic CIDEB mutation in the DNA molecule.

[0936] In one aspect, provided herein are methods of characterizing a disease in a subject, the method comprising (a) isolating and purifying DNA (or having DNA isolated and purified) in a sample from the subject; (b) detecting the presence or absence of a somatic CIDEB mutation in the DNA; and (c) characterizing the liver disease as somatic CIDEB mutation positive or somatic CIDEB mutation negative based on the detection.

[0937] The following applicable to any of the foregoing aspects, in some embodiments, the subject is suspected of having, has been diagnosed with, or has a liver disease. In some embodiments, the liver disease is fatty liver disease, liver inflammation, nonalcoholic steatohepatitis (NASH), nonalcoholic fatty liver disease (NAFLD), obesity-induced metabolic syndrome, insulin insensitivity, obesity, type-2 diabetes, alcoholic fatty liver disease (AFLD), cirrhosis, metabolic dysfunction associated steatotic liver disease (MASLD), metabolic-associated steatohepatitis (MASH), metabolic dysfunction associated fatty liver disease (MAFLD), metabolic dysfunction and alcohol associated steatotic liver disease (MetALD), steatotic liver disease (SLD), cryptogenic SLD, liver fibrosis, liver failure, jaundice, a liver infection (e.g., hepatitis C infection, hepatitis B infection), or a cardiovascular disease (e.g., atherosclerosis, coronary artery disease, myocardial infarction, or heart failure).

[0938] In specific embodiments, the liver disease is fatty liver disease, liver inflammation, NASH or NAFLD. In specific embodiments, the liver disease is obesity-induced metabolic syndrome, insulin insensitivity, obesity, type-2 diabetes, AFLD, or cirrhosis. In specific embodiments, the liver disease is MASLD, MASH, MAFLD, MetALD, SLD, or cryptogenic SLD. See, e.g., Rinella M. et al., A multisociety Delphi consensus statement on new fatty liver disease nomenclature, Hepatology 78 (6): p 1966-1986 December 2023, the entire contents of which is incorporated herein by reference for all purposes. In specific embodiments, the liver disease is the liver fibrosis, liver inflammation, cirrhosis, liver failure, or jaundice. In specific embodiments, the disease is obesity or type-2 diabetes. In specific embodiments, the liver disease is a liver infection (e.g., hepatitis C infection, hepatitis B infection). In specific embodiments, the liver infection is a hepatitis infection. In specific embodiments, the hepatitis infection is a hepatitis C infection or hepatitis B infection. In specific embodiments, the liver disease is a cardiovascular disease (e.g., atherosclerosis, coronary artery disease, myocardial infarction, or heart failure). In specific embodiments, the cardiovascular disease is atherosclerosis, coronary artery disease, myocardial infarction, or heart failure. In specific embodiments, the liver disease is atherosclerosis, coronary artery disease, myocardial infarction, or heart failure.

[0939] In specific embodiments, the liver disease is fatty liver disease, steatotic liver disease, liver inflammation, NASH, NAFLD, MASLD, MASH, MAFLD, MetALD, SLD, or cryptogenic SLD.

[0940] In specific embodiments, the liver disease is a CIDEB associated disease.

[0941] In some embodiments, the CIDEB associated disease is fatty liver disease, liver inflammation, nonalcoholic steatohepatitis (NASH), nonalcoholic fatty liver disease (NAFLD), obesity-induced metabolic syndrome, insulin insensitivity, obesity, type-2 diabetes, alcoholic fatty liver disease (AFLD), cirrhosis, metabolic dysfunction associated steatotic liver disease (MASLD), metabolic-associated steatohepatitis (MASH), metabolic dysfunction associated fatty liver disease (MAFLD), metabolic dysfunction and alcohol associated steatotic liver disease (MetALD), steatotic liver disease (SLD), cryptogenic SLD, liver fibrosis, liver failure, jaundice, a liver infection (e.g., hepatitis C infection, hepatitis B infection), or a cardiovascular disease (e.g., atherosclerosis, coronary artery disease, myocardial infarction, or heart failure).

[0942] In specific embodiments, the CIDEB associated disease is fatty liver disease, liver inflammation, NASH or NAFLD. In specific embodiments, the CIDEB associated disease is obesity-induced metabolic syndrome, insulin insensitivity, obesity, type-2 diabetes, AFLD, or cirrhosis. In specific embodiments, the CIDEB associated disease is MASLD, MASH, MAFLD, MetALD, SLD, or cryptogenic SLD. See, e.g., Rinella M. et al., A multisociety Delphi consensus statement on new fatty liver disease nomenclature, Hepatology 78 (6): p 1966-1986 December 2023, the entire contents of which is incorporated herein by reference for all purposes. In specific embodiments, the CIDEB associated disease is the liver fibrosis, liver inflammation, cirrhosis, liver failure, or jaundice. In specific embodiments, the disease is obesity or type-2 diabetes. In specific embodiments, the CIDEB associated disease is a liver infection (e.g., hepatitis C infection, hepatitis B infection). In specific embodiments, the liver infection is a hepatitis infection. In specific embodiments, the hepatitis infection is a hepatitis C infection or hepatitis B infection. In specific embodiments, the CIDEB associated disease is a cardiovascular disease (e.g., atherosclerosis, coronary artery disease, myocardial infarction, or heart failure). In specific embodiments, the cardiovascular disease is atherosclerosis, coronary artery disease, myocardial infarction, or heart failure. In specific embodiments, the CIDEB associated disease is atherosclerosis, coronary artery disease, myocardial infarction, or heart failure.

[0943] In specific embodiments, the CIDEB associated disease is fatty liver disease, steatotic liver disease, liver inflammation, NASH, NAFLD, MASLD, MASH, MAFLD, MetALD, SLD, or cryptogenic SLD.

### 4.12 Kits

[0944] In a one aspect, provided herein are kits comprising any one or more agent described herein (e.g., an RNAi agent, a dsRNA agent, an antisense strand, a sense strand) (see, e.g., §§ 4.2, 4.3); a vector described herein (see, e.g., § 4.6); a conjugate described herein (see, e.g., § 4.4); a carrier described herein (see, e.g., § 4.8); a host cell described herein (see, e.g., § 4.9); and/or a pharmaceutical composition described herein (see, e.g., § 4.10); or any combination thereof. In addition, the kit may comprise a liquid vehicle for solubilizing or diluting, and/or technical instructions. The technical instructions of the kit may contain information about administration and dosage and subject groups.

[0945] In some embodiments, the agent (e.g., described herein) (e.g., RNAi agent, dsRNA agent, antisense strand, sense strand), vector (e.g., described herein), conjugate (e.g., described herein), carrier (e.g., described herein), host cell (e.g., described herein), and/or pharmaceutical composition (e.g., described herein) is provided in a separate part of the kit. In some embodiments, the agent (e.g., described herein) (e.g., RNAi agent, dsRNA agent, antisense strand, sense strand), vector (e.g., described herein), conjugate (e.g., described herein), carrier (e.g., described herein), host cell (e.g., described herein), and/or pharmaceutical composition (e.g., described herein) is optionally lyophilized, spray-dried, or spray-freeze dried. The kit may further contain as a part a vehicle (e.g., buffer solution) for solubilizing the dried or lyophilized any agent (e.g., described herein) (e.g., RNAi agent, dsRNA agent, antisense strand, sense strand), vector (e.g., described herein), conjugate (e.g., described herein), carrier (e.g., described herein), host cell (e.g., described herein), and/or pharmaceutical composition (e.g., described herein).

[0946] In some embodiments, the kit comprises a single dose container. In some embodiments, the kit comprises a multi-dose container. In some embodiments, the kit comprises an administration device (e.g., an injector for intradermal injection or a syringe for intramuscular injection).

[0947] Any of the kits described herein may be used in any of the methods described herein (see, e.g., § 4.11).

### 5. EXAMPLES

TABLE OF CONTENTS

| | |
|---|---|
| 5.1 | Example 1. CIDEB selection in Nonalcoholic Steatohepatitis. |
| 5.2 | Example 2. Design of CIDEB Targeting RNAi Agents. |
| 5.3 | Example 3. Synthesis of CIDEB Targeting RNAi Agents. |
| 5.4 | Example 4. In Vitro dsRNA Agent Mediated Knockdown |
| | of hCIDEB in Hep3B Cells. |
| 5.5 | Example 5. In Vitro dsRNA Agent Mediated Knockdown |
| | of hCIDEB in Primary Human Hepatocytes. |
| 5.6 | Example 6. In Vitro dsRNA Agent Mediated Knockdown |
| | of hCIDEB in Primary Human Hepatocytes. |
| 5.7 | Example 7. In Vitro dsRNA Agent Mediated Knockdown |
| | of hCIDEB in Primary Cyno Hepatocytes. |
| 5.8 | Example 8. In Vitro GalNAc-dsRNA Agent Mediated |
| | Knockdown of hCIDEB in Hep3B cells. |
| 5.9 | Example 9. In Vitro GalNAc-dsRNA Agent Mediated |
| | Knockdown of hCIDEB in Primary Human Hepatocytes. |
| 5.1 | Example 1. CIDEB selection in Nonalcoholic Steatohepatitis. |

[0948] The selection of CIDEB in the context of nonalcoholic steatohepatitis (NASH) was evaluated. Briefly, liver samples from 46 subjects with NASH and 20 subjects without liver disease were sequenced using Nanoseq at a mean sequencing depth of 549 Dx per sample in NASH and 1218 Dx per sample in normal liver. Results of interest in the primary sample (defined as a global q-value<0.1) were restricted hypothesis tested in the control analysis. In the primary sample, CIDEB had an enrichment ratio of 11.6 and a global q-value=0.077; there was no indication of selection in the normal liver samples. Taken together, these findings indicate that CIDEB is positively selected for in NASH, meaning that cell clones with mutations in the CIDEB gene proliferate under NASH disease conditions.

### 5.2 Example 2. Design of CIDEB Targeting RNAi Agents

[0949] dsRNA agents targeting hCIDEB (NCBI Ref.: NM_014430.4) were designed. The nucleotide sequence of the unmodified CIDEB sense and antisense strands of each of the dsRNA agents are set forth in Table 2; and the nucleotide sequence of the exemplary modified CIDEB sense and antisense strands of each of the dsRNA agents are set forth in Table 3.

### 5.3 Example 3. Synthesis of CIDEB Targeting RNAi Agents

[0950] The dsRNA agents set forth in Table 2 and Table 3 were synthesized using standard methods known in the art and described herein. Briefly, the dsRNA agents were synthesized using a Mermade 192 synthesizer (BioAutomation) on controlled pore glass (500-1000 A) solid supports loaded with a first nucleotide of interest. Upon completion of the solid phase synthesis, solid-supported polynucleotides were treated with Methylamine (40% aqueous) at room temperature in 96 well plates for approximately 2 hours to afford cleavage from the solid support and subsequent removal of relevant protecting groups. Polynucleotides were precipitated by the addition of 1 mL of 9:1 acetontrile:ethanol or 1:1 ethanol:isopropanol. The plates were then centrifuged at 4° C. for 45 minutes and the supernatant removed. The polynucleotide pellet was resuspended in 20 mM NaOAc and subsequently desalted using a HiTrap size exclusion column (5 mL, GE Healthcare) on an Agilent LC system equipped with an autosampler, UV detector, conductivity meter, and fraction collector. Desalted samples were collected in 96 well plates and then analyzed by LC-MS and UV spectrometry to confirm identity and quantify the amount of material, respectively.

[0951] Duplexing of single strands was performed on a Tecan liquid handling robot. Sense and antisense single strands were combined in an equimolar ratio to a final concentration of 10 μM in 1×PBS in 96 well plates, the plate was sealed, incubated at 100° C. for 10 minutes, and was subsequently allowed to return slowly to room temperature over a period of 2-3 hours. The concentration and identity of each duplex was confirmed and is then subsequently utilized for screening assays.

### 5.4 Example 4. In Vitro dsRNA Agent Mediated Knockdown of hCIDEB in Hep3B Cells

[0952] Each of dsRNA Agents 240-478 set forth in Table 3 above were evaluated for their ability to knockdown hCIDEB expression in vitro in Hep3B Cells.

[0953] Briefly, Hep3B cells (ATCC) were seeded at 15,000 cells per well in a standard 96 well plate. The cells were transfected with the indicated hCIDEB targeting dsRNA agent (either 0.3 nM or 20 nM) using Lipofectamine RNAiMax (0.3 μl/well) (Thermo Fisher Scientific) according to the manufacturer's instructions and incubated for 24 hours. The level of hCIDEB was assessed utilizing a standard branched DNA (bDNA) assay (Quantigene 2.0 (Thermo Fisher Scientific)) according to the manufacturer's instructions. The expression of hCIDEB was normalized to the expression of human GAPDH. Each treatment group was run in quadruplicate, the mean and standard deviation calculated.

[0954] Table 5 shows the percent of hCIDEB mRNA remaining after treatment with the indicated dsRNA agent (normalized to GAPDH and relative to control treated cells set to 100%).

TABLE 5
Range % hCIDEB mRNA Remaining (Normalized to GAPDH).

| dsRNA | CIDEB/GAPDH | |
|---|---|---|
| Agent | 20 nM | 0.3 nM |
| 240 | 80-95 | 75-85 |
| 241 | 70-90 | 65-85 |
| 242 | 60-80 | 55-80 |
| 243 | 70-100 | 70-90 |
| 244 | 85-115 | 70-95 |
| 245 | 95-120 | 90-105 |
| 246 | 65-100 | 70-90 |
| 247 | 65-95 | 70-95 |
| 248 | 70-95 | 65-80 |
| 249 | 75-90 | 75-90 |
| 250 | 75-95 | 70-85 |
| 251 | 80-95 | 60-95 |
| 252 | 70-95 | 60-85 |
| 253 | 70-105 | 50-95 |
| 254 | 75-110 | 60-95 |
| 255 | 95-145 | 70-100 |
| 256 | 60-95 | 55-85 |
| 257 | 70-105 | 60-100 |
| 258 | 30-45 | 35-45 |
| 259 | 85-130 | 75-105 |
| 260 | 65-100 | 70-80 |
| 261 | 85-100 | 60-85 |
| 262 | 70-110 | 55-80 |
| 263 | 85-110 | 70-90 |
| 264 | 30-40 | 35-45 |
| 265 | 80-95 | 50-65 |
| 266 | 70-95 | 50-65 |
| 267 | 55-85 | 50-135 |
| 268 | 60-95 | 55-65 |
| 269 | 70-110 | 70-90 |
| 270 | 70-105 | 60-90 |
| 271 | 60-110 | 55-85 |
| 272 | 65-105 | 60-95 |
| 273 | 70-105 | 60-95 |
| 274 | 60-90 | 55-90 |
| 275 | 65-90 | 45-95 |
| 276 | 60-90 | 55-95 |
| 277 | 65-105 | 70-105 |
| 278 | 65-110 | 65-110 |
| 279 | 70-115 | 70-100 |
| 280 | 80-110 | 70-90 |
| 281 | 70-100 | 60-75 |
| 282 | 60-95 | 55-70 |
| 283 | 65-105 | 50-65 |
| 284 | 65-105 | 55-70 |
| 285 | 65-110 | 60-70 |
| 286 | 55-75 | 55-65 |
| 287 | 30-55 | 40-50 |
| 288 | 70-115 | 65-75 |
| 289 | 65-115 | 70-85 |
| 290 | 90-110 | 70-95 |
| 291 | 70-120 | 60-90 |
| 292 | 70-120 | 65-90 |
| 293 | 70-105 | 55-95 |
| 294 | 90-130 | 60-105 |
| 295 | 70-110 | 60-100 |
| 296 | 80-125 | 65-95 |
| 297 | 55-80 | 65-90 |
| 298 | 45-75 | 60-85 |
| 299 | 75-130 | 70-110 |
| 300 | 65-85 | 60-75 |
| 301 | 45-85 | 60-80 |
| 302 | 35-80 | 55-75 |
| 303 | 30-55 | 40-55 |
| 304 | 50-85 | 55-80 |
| 305 | 45-80 | 50-75 |
| 306 | 50-90 | 60-75 |
| 307 | 50-85 | 60-85 |
| 308 | 50-80 | 50-70 |
| 309 | 55-75 | 65-80 |
| 310 | 60-90 | 70-85 |
| 311 | 55-80 | 70-110 |
| 312 | 50-75 | 70-95 |
| 313 | 45-75 | 75-105 |
| 314 | 45-65 | 75-100 |
| 315 | 40-75 | 80-100 |
| 316 | 45-75 | 70-115 |
| 317 | 45-70 | 65-100 |
| 318 | 45-70 | 65-95 |
| 319 | 60-90 | 65-90 |
| 320 | 60-75 | 70-85 |
| 321 | 60-80 | 75-90 |
| 322 | 50-80 | 80-100 |
| 323 | 55-90 | 85-115 |
| 324 | 55-85 | 85-115 |
| 325 | 50-90 | 80-105 |
| 326 | 80-95 | 85-105 |
| 327 | 75-115 | 85-95 |
| 328 | 125-140 | 105-115 |
| 329 | 70-100 | 75-100 |
| 330 | 65-90 | 85-100 |
| 331 | 105-130 | 100-115 |
| 332 | 105-150 | 100-110 |
| 333 | 60-75 | 70-90 |
| 334 | 70-80 | 85-95 |
| 335 | 60-90 | 75-95 |
| 336 | 85-135 | 80-95 |
| 337 | 55-75 | 65-80 |
| 338 | 55-80 | 70-90 |
| 339 | 60-85 | 80-95 |
| 340 | 65-90 | 75-90 |
| 341 | 60-95 | 75-85 |
| 342 | 85-105 | 80-110 |
| 343 | 50-80 | 55-95 |
| 344 | 55-100 | 60-80 |
| 345 | 55-100 | 65-75 |
| 346 | 50-95 | 60-75 |
| 347 | 50-100 | 65-80 |
| 348 | 55-90 | 65-80 |
| 349 | 80-105 | 80-100 |
| 350 | 65-115 | 70-90 |
| 351 | 55-105 | 65-95 |
| 352 | 70-105 | 75-85 |
| 353 | 70-105 | 90-105 |
| 354 | 55-90 | 70-95 |
| 355 | 70-120 | 90-105 |
| 356 | 50-80 | 65-75 |
| 357 | 50-90 | 70-80 |
| 358 | 5-15 | 10-15 |
| 359 | 10-20 | 10-15 |
| 360 | 15-30 | 25-35 |
| 361 | 10-20 | 15-20 |
| 362 | 35-60 | 40-55 |
| 363 | 5-15 | 10-20 |
| 364 | 5-15 | 10-20 |
| 365 | 5-15 | 10-15 |
| 366 | 5-10 | 5-15 |
| 367 | 0-10 | 5-10 |
| 368 | 0-15 | 5-10 |
| 369 | 5-10 | 5-15 |
| 370 | 15-30 | 20-30 |
| 371 | 20-25 | 20-30 |
| 372 | 10-20 | 10-20 |
| 373 | 10-15 | 5-15 |
| 374 | 5-10 | 5-10 |
| 375 | 5-20 | 10-15 |
| 376 | 5-10 | 5-15 |
| 377 | 15-35 | 25-35 |
| 378 | 30-40 | 45-60 |
| 379 | 55-70 | 50-75 |
| 380 | 5-20 | 15-25 |
| 381 | 10-20 | 10-20 |
| 382 | 45-60 | 35-50 |
| 383 | 35-50 | 50-60 |
| 384 | 25-35 | 25-35 |
| 385 | 35-50 | 35-45 |
| 386 | 30-45 | 20-25 |
| 387 | 5-10 | 10-15 |
| 388 | 5-10 | 10-15 |
| 389 | 15-20 | 10-20 |
| 390 | 10-15 | 10-20 |
| 391 | 5-15 | 10-15 |
| 392 | 60-65 | 65-80 |
| 393 | 30-60 | 25-85 |
| 394 | 15-20 | 20-30 |
| 395 | 45-70 | 55-75 |
| 396 | 30-45 | 50-70 |
| 397 | 10-15 | 15-20 |
| 398 | 10-20 | 15-25 |
| 399 | 10-20 | 15-30 |
| 400 | 10-20 | 15-25 |
| 401 | 10-20 | 10-20 |
| 402 | 45-60 | 40-60 |
| 403 | 5-15 | 15-20 |
| 404 | 5-10 | 5-15 |
| 405 | 10-20 | 10-20 |
| 406 | 10-20 | 10-15 |
| 407 | 10-20 | 10-20 |
| 408 | 10-15 | 10-15 |
| 409 | 10-15 | 5-15 |
| 410 | 10-25 | 25-35 |
| 411 | 5-15 | 10-20 |
| 412 | 5-15 | 10-15 |
| 413 | 10-20 | 15-25 |
| 414 | 5-15 | 10-15 |
| 415 | 10-20 | 15-25 |
| 416 | 10-15 | 20-30 |
| 417 | 10-20 | 20-35 |
| 418 | 10-15 | 15-25 |
| 419 | 10-15 | 15-30 |
| 420 | 45-65 | 40-70 |
| 421 | 10-20 | 15-20 |
| 422 | 5-15 | 10-25 |
| 423 | 40-55 | 65-70 |
| 424 | 55-80 | 85-105 |
| 425 | 65-95 | 100-115 |
| 426 | 50-80 | 85-105 |
| 427 | 55-85 | 90-115 |
| 428 | 55-80 | 85-100 |
| 429 | 60-90 | 85-100 |
| 430 | 65-90 | 80-95 |
| 431 | 70-90 | 80-90 |
| 432 | 60-90 | 65-85 |
| 433 | 45-70 | 60-70 |
| 434 | 30-60 | 50-55 |
| 435 | 35-65 | 50-65 |
| 436 | 60-105 | 80-90 |
| 437 | 55-85 | 75-90 |
| 438 | 55-90 | 75-80 |
| 439 | 80-125 | 85-100 |
| 440 | 15-25 | 20-25 |
| 441 | 10-15 | 15-20 |
| 442 | 5-15 | 5-15 |
| 443 | 5-10 | 5-10 |
| 444 | 10-20 | 15-20 |
| 445 | 40-70 | 65-80 |
| 446 | 5-10 | 5-10 |
| 447 | 5-10 | 5-10 |
| 448 | 15-30 | 15-25 |
| 449 | 15-25 | 15-20 |
| 450 | 15-25 | 10-15 |
| 451 | 10-15 | 5-15 |
| 452 | 10-20 | 10-15 |
| 453 | 15-35 | 10-20 |
| 454 | 5-15 | 10-20 |
| 455 | 15-25 | 15-20 |
| 456 | 5-20 | 10-20 |
| 457 | 10-20 | 15-20 |
| 458 | 10-20 | 10-20 |
| 459 | 10-25 | 15-20 |
| 460 | 10-20 | 10-15 |
| 461 | 5-20 | 10-20 |
| 462 | 5-10 | 5-15 |
| 463 | 0-10 | 5-10 |
| 464 | 0-10 | 5-10 |
| 465 | 0-10 | 5-10 |
| 466 | 10-15 | 15-20 |
| 467 | 5-15 | 10-15 |
| 468 | 35-55 | 50-60 |
| 469 | 35-50 | 30-40 |
| 470 | 5-10 | 5-15 |
| 471 | 5-10 | 5-15 |
| 472 | 5-15 | 10-20 |
| 473 | 5-15 | 20-25 |
| 474 | 5-10 | 10-20 |
| 475 | 5-10 | 10-20 |
| 476 | 0-10 | 10-15 |
| 477 | 10-20 | 15-25 |
| 478 | 5-10 | 10-15 |

### 5.5 Example 5. In Vitro dsRNA Agent Mediated Knockdown of hCIDEB in Primary Human Hepatocytes

[0955] Each of dsRNA Agents 366, 367, 388, 404, 411, 442, 443, 446, 447, 462, 463, 464, 465, 467, 470, 471, 474, 475, 476, and 478 set forth in Table 3 above were evaluated for their ability to knockdown hCIDEB expression in vitro in primary human hepatocytes.

[0956] Briefly, primary human hepatocytes were seeded at 15,000 cells per well in a standard 96 well plate. The cells were transfected with the indicated hCIDEB targeting dsRNA agent (20 nM, 0.3 nM) using Lipofectamine RNAiMax (0.3 μl/well) (Thermo Fisher Scientific) according to the manufacturer's instructions and incubated for 24 hours. The level of hCIDEB was assessed utilizing a standard bDNA assay (Quantigene 2.0 (Thermo Fisher Scientific)) according to manufacturer's instructions. The expression of hCIDEB was normalized to the expression of human GAPDH. Each treatment group was run in quadruplicate.

[0957] Table 6 shows the calculated IC50 (nM), IC80 (nM), and the remaining hCIDEB mRNA percent (normalized to GAPDH) (mean of quadruplicates).

TABLE 6
IC50, IC80, and Max % Inhibition of hCIDEB mRNA
(Normalized to GAPDH).

| dsRNA | | | % Maximum |
|---|---|---|---|
| Agent | IC50 [nM] | IC80 [nM] | Inhibition |
| 366 | >0.001 ≤ 0.01 | >0.01 ≤ 0.1 | >80 ≤ 90 |
| 367 | >0.0001 ≤ 0.001 | >0.001 ≤ 0.01 | >90 ≤ 100 |
| 388 | >0.01 ≤ 0.1 | >0.01 ≤ 0.1 | >90 ≤ 100 |
| 404 | >0.001 ≤ 0.01 | >0.01 ≤ 0.1 | >80 ≤ 90 |
| 411 | >0.01 ≤ 0.1 | >0.1 ≤ 1 | >90 ≤ 100 |
| 442 | >0.01 ≤ 0.1 | >0.01 ≤ 0.1 | >90 ≤ 100 |
| 443 | >0.001 ≤ 0.01 | >0.01 ≤ 0.1 | >90 ≤ 100 |
| 446 | >0.001 ≤ 0.01 | >0.01 ≤ 0.1 | >90 ≤ 100 |
| 447 | >0.001 ≤ 0.01 | >0.01 ≤ 0.1 | >90 ≤ 100 |
| 462 | >0.001 ≤ 0.01 | >0.01 ≤ 0.1 | >90 ≤ 100 |
| 463 | >0.001 ≤ 0.01 | >0.01 ≤ 0.1 | >90 ≤ 100 |
| 464 | >0.001 ≤ 0.01 | >0.01 ≤ 0.1 | >80 ≤ 90 |
| 465 | >0.001 ≤ 0.01 | >0.01 ≤ 0.1 | >90 ≤ 100 |
| 467 | >0.001 ≤ 0.01 | >0.01 ≤ 0.1 | >80 ≤ 90 |
| 470 | >0.001 ≤ 0.01 | >0.01 ≤ 0.1 | >90 ≤ 100 |
| 471 | >0.0001 ≤ 0.001 | >0.001 ≤ 0.01 | >90 ≤ 100 |
| 474 | >0.001 ≤ 0.01 | >0.01 ≤ 0.1 | >80 ≤ 90 |
| 475 | >0.001 ≤ 0.01 | >0.01 ≤ 0.1 | >90 ≤ 100 |
| 476 | >0.001 ≤ 0.01 | >0.001 ≤ 0.01 | >90 ≤ 100 |
| 478 | >0.001 ≤ 0.01 | >0.01 ≤ 0.1 | >90 ≤ 100 |

### 5.6 Example 6. In Vitro dsRNA Agent Mediated Knockdown of hCIDEB in Primary Human Hepatocytes

[0958] Each of dsRNA Agents 368, 369, 373, 374, 375, 376, 380, 443, 387, 388, 390, 391, 474, 473, 477, 457, 397, 472, 403, 405, 406, 408, 409, 411, 414, 415, or 417 set forth in Table 3 above were evaluated for their ability to knockdown hCIDEB expression in vitro in primary human hepatocytes.

[0959] Briefly, primary human hepatocytes were seeded at 80,000 cells per well in a standard 96 well plate. The cells were transfected with the indicated hCIDEB targeting dsRNA agent (20 nM, 4 nM, 0.8 nM, 0.16 nM, 0.032 nM, 0.0064 nM, 0.00128 nM, 0.000256 nM, 0.0000512 nM, or 0.00001024 nM) using Lipofectamine RNAiMax (0.3 μl/well) (Thermo Fisher Scientific) according to the manufacturer's instructions and incubated for 24 hours. The level of hCIDEB was assessed utilizing a standard bDNA assay (Quantigene 2.0 (Thermo Fisher Scientific)) according to manufacturer's instructions. The expression of hCIDEB was normalized to the expression of human GAPDH. Each treatment group was run in quadruplicate.

[0960] Table 7 shows the calculated IC50 (nM), IC80 (nM), and the remaining hCIDEB mRNA percent (normalized to GAPDH) (mean of quadruplicates).

TABLE 7
IC50, IC80, and Max % Inhibition of hCIDEB mRNA
(Normalized to GAPDH).

| | | | % Maximum |
|---|---|---|---|
| DsRNA Agent | IC50 [nM] | IC80 [nM] | Inhibition |
| 368 | >0.001 ≤ 0.01 | >0.01 ≤ 0.1 | >80 ≤ 90 |
| 369 | >0.01 ≤ 0.1 | >0.1 ≤ 1 | >80 ≤ 90 |
| 373 | >0.01 ≤ 0.1 | >0.1 ≤ 1 | >80 ≤ 90 |
| 374 | >0.01 ≤ 0.1 | >0.1 ≤ 1 | >80 ≤ 90 |
| 375 | >0.01 ≤ 0.1 | N/A | >70 ≤ 80 |
| 376 | >0.01 ≤ 0.1 | >0.1 ≤ 1 | >80 ≤ 90 |
| 380 | >0.1 ≤ 1 | N/A | >60 ≤ 70 |
| 443 | >0.01 ≤ 0.1 | >0.1 ≤ 1 | >80 ≤ 90 |
| 387 | >0.01 ≤ 0.1 | >0.1 ≤ 1 | >80 ≤ 90 |
| 388 | >0.01 ≤ 0.1 | >1 ≤ 5 | >80 ≤ 90 |
| 390 | >0.01 ≤ 0.1 | N/A | >70 ≤ 80 |
| 391 | >0.01 ≤ 0.1 | N/A | >80 ≤ 90 |
| 474 | >0.1 ≤ 1 | N/A | >70 ≤ 80 |
| 473 | >0.01 ≤ 0.1 | N/A | >70 ≤ 80 |
| 477 | >0.01 ≤ 0.1 | N/A | >70 ≤ 80 |
| 457 | >0.01 ≤ 0.1 | >1 ≤ 5 | >80 ≤ 90 |
| 397 | >0.1 ≤ 1 | N/A | >70 ≤ 80 |
| 472 | >0.01 ≤ 0.1 | >0.1 ≤ 1 | >80 ≤ 90 |
| 403 | >0.1 ≤ 1 | N/A | >70 ≤ 80 |
| 405 | >0.01 ≤ 0.1 | >0.1 ≤ 1 | >80 ≤ 90 |
| 406 | >0.01 ≤ 0.1 | N/A | >70 ≤ 80 |
| 408 | >0.001 ≤ 0.01 | >0.1 ≤ 1 | >80 ≤ 90 |
| 409 | >0.001 ≤ 0.01 | >0.1 ≤ 1 | >80 ≤ 90 |
| 411 | >0.01 ≤ 0.1 | N/A | >70 ≤ 80 |
| 414 | >0.01 ≤ 0.1 | >0.1 ≤ 1 | >80 ≤ 90 |
| 415 | >0.1 ≤ 1 | N/A | >70 ≤ 80 |
| 417 | >0.1 ≤ 1 | N/A | >70 ≤ 80 |

### 5.7 Example 7. In Vitro dsRNA Agent Mediated Knockdown of hCIDEB in Primary Cyno Hepatocytes

[0961] Each of dsRNA Agents 368, 369, 373, 374, 375, 376, 387, 388, 390, 391, 405, 406, 408, 409, 411, 414, 443, 457, 472 or 477 set forth in Table 3 above were evaluated for their ability to knockdown hCIDEB expression in vitro in primary cynomolgus macaque (cyno) hepatocytes.

[0962] Briefly, primary cyno hepatocytes were seeded at 60,000 cells per well in a standard 96 well plate. The cells were transfected with the indicated hCIDEB targeting dsRNA agent (20 nM, 0.1 nM) using Lipofectamine RNAiMax (0.3 μl/well) (Thermo Fisher Scientific) according to the manufacturer's instructions and incubated for 24 hours. The level of cyno CIDEB was assessed utilizing a standard bDNA assay (Quantigene 2.0 (Thermo Fisher Scientific)) according to manufacturer's instructions. The expression of cyno CIDEB was normalized to the expression of cyno GAPDH. Each treatment group was run in quadruplicate.

[0963] Table 8 shows the percent of cyno CIDEB mRNA remaining after treatment with the indicated dsRNA agent (normalized to GAPDH and relative to control treated cells set to 100%).

TABLE 8
Range % cyno CIDEB mRNA Remaining (Normalized to GAPDH).

| dsRNA | CIDEB/GAPDH | |
|---|---|---|
| Agent | 20 nM | 0.1 nM |
| 368 | 10-15 | 15-20 |
| 369 | 10-15 | 35-40 |
| 373 | 10-15 | 20-25 |
| 374 | 10-15 | 20-25 |
| 375 | 20-25 | 60-70 |
| 376 | 10-15 | 30-40 |
| 387 | 10-15 | 30-40 |
| 388 | 15-20 | 50-60 |
| 390 | 20-25 | 60-70 |
| 391 | 15-20 | 30-40 |
| 405 | 20-25 | 40-50 |
| 406 | 20-25 | 30-40 |
| 408 | 10-15 | 15-20 |
| 409 | 15-20 | 20-25 |
| 411 | 20-25 | 70-80 |
| 414 | 50-60 | 80-90 |
| 443 | 10-15 | 25-30 |
| 457 | 15-20 | 30-40 |
| 472 | 10-15 | 40-50 |
| 477 | 50-60 | 70-80 |

### 5.8 Example 8. In Vitro GalNAc-dsRNA Agent Mediated Knockdown of hCIDEB in Hep3B Cells

[0964] Each of GalNAc-dsRNA Agents 483, 484, 485, 486, and 487 set forth in Table 11 above were evaluated for their ability to knockdown hCIDEB expression in vitro in Hep3B cells. Each base modified siRNA was synthesized as a GalNAc conjugate, introduced as the triantennary GalNAc-TEG cluster at the 3′-end of each of the sense strand.

[0965] The corresponding base modified dsRNA agent (set forth in Table 3) as well as the corresponding base unmodified dsRNA agent (set forth in Table 2) for each of the GalNAc-dsRNA agents 483-487 is also set forth in Table 11.

[0966] Briefly, Hep3B cells (ATCC) were seeded at 15,000 cells per well in a standard 96 well plate. The cells were transfected with the indicated hCIDEB targeting dsRNA agent (either 0.3 nM or 20 nM) using Lipofectamine RNAiMax (0.3 μl/well) (Thermo Fisher Scientific) according to the manufacturer's instructions and incubated for 24 hours. The level of hCIDEB was assessed utilizing a standard branched DNA (bDNA) assay (Quantigene 2.0 (Thermo Fisher Scientific)) according to the manufacturer's instructions. The expression of hCIDEB was normalized to the expression of human GAPDH. Each treatment group was run in quadruplicate, the mean and standard deviation calculated.

[0967] Table 9 shows the percent of hCIDEB mRNA remaining after treatment with the indicated GalNAc-dsRNA Agent (normalized to GAPDH and relative to control treated cells set to 100%).

TABLE 9
Range % hCIDEB mRNA Remaining (Normalized to GAPDH).

| | CIDEB/GAPDH | |
|---|---|---|
| dsRNA Agent | 20 nM | 0.3 nM |
| 487 | 10-15 | 5-10 |
| 483 | 5-10 | 5-10 |
| 486 | 5-10 | 5-10 |
| 484 | 5-10 | 5-10 |
| 485 | 5-10 | 10-15 |

### 5.9 Example 9. In Vitro GalNAc-dsRNA Agent Mediated Knockdown of hCIDEB in Primary Human Hepatocytes

[0968] Each of GalNAc-dsRNA Agents 483, 484, 485, 486, and 487 set forth in Table 11 above were evaluated for their ability to knockdown hCIDEB expression in vitro. Each base modified siRNA was synthesized as GalNAc conjugates, introduced as the triantennary GalNAc-TEG cluster at the 3′-end of each of the sense strands.

[0969] The corresponding base modified dsRNA agent (set forth in Table 3) as well as the corresponding base unmodified dsRNA agent (set forth in Table 2) for each of the GalNAc-dsRNA agents 483-487 is set forth in Table 11.

[0970] Briefly, primary human hepatocytes were seeded at 90,000 cells per well in a standard 96 well plate. The cells were treated with the indicated hCIDEB targeting GalNAc-dsRNA agent by uptake (5000 nM, 1250 nM, 313 nM, 78.1 nM, 19.5 nM, 4.88 nM, 1.22 nM, 0.305 nM, 0.0763 nM, or 0.0191 nM) and incubated for 48 hours. The level of hCIDEB was assessed utilizing a standard bDNA assay (Quantigene 2.0 (Thermo Fisher Scientific)) according to manufacturer's instructions. The expression of hCIDEB was normalized to the expression of human GAPDH. Each treatment group was run in quadruplicate.

[0971] Table 10 shows the calculated IC50 (nM), IC80 (nM), and the remaining hCIDEB mRNA percent (normalized to GAPDH) (mean of quadruplicates).

TABLE 10
IC50, IC80, and Max % Inhibition of hCIDEB mRNA
(Normalized to GAPDH).

| DsRNA | | | % Maximum |
|---|---|---|---|
| Agent | IC50 [nM] | IC80 [nM] | Inhibition |
| 487 | >1 ≤ 5 | >20 ≤ 30 | >80 ≤ 90 |
| 483 | >1 ≤ 5 | >10 ≤ 20 | >80 ≤ 90 |
| 486 | >1 ≤ 5 | >40 ≤ 50 | >80 ≤ 90 |
| 484 | >1 ≤ 5 | >50 ≤ 60 | >80 ≤ 90 |
| 485 | >1 ≤ 5 | >30 ≤ 40 | >80 ≤ 90 |

[0972] The invention is not to be limited in scope by the specific embodiments described herein. Indeed, various modifications of the invention in addition to those described will become apparent to those skilled in the art from the foregoing description and accompanying FIGURES. Such modifications are intended to fall within the scope of the appended claims.

[0973] All references (e.g., publications or patents or patent applications) cited herein are incorporated herein by reference in their entireties and for all purposes to the same extent as if each individual reference (e.g., publication or patent or patent application) was specifically and individually indicated to be incorporated by reference in its entirety for all purposes.

[0974] Other embodiments are within the following claims.

1. A double stranded ribonucleic acid (dsRNA) agent for inhibiting expression of cell death inducing DNA fragmentation factor alpha like effector (CIDEB),
wherein the dsRNA agent comprises a sense strand and an antisense strand forming a double stranded region,
wherein the nucleotide sequence of the antisense strand differs by no more than 5 nucleotides from the nucleotide sequence of any one of the antisense strands set forth in Table 2 or Table 3 or set forth in any one of SEQ ID NOS: 187-369, 602-657, 893-1131, or 1188-1191.

2. The dsRNA agent of claim 1, wherein the nucleotide sequence of the sense strand differs by no more than 5 nucleotides from the nucleotide sequence of the corresponding sense strand set forth in Table 2 or Table 3 or the corresponding sense strand set forth in one of SEQ ID NOS: 4-186, 553-601, 658-892, or 1192.

3.-4. (canceled)

5. The dsRNA agent of claim 1, wherein
(a) the nucleotide sequence of the antisense strand differs by no more than 5 nucleotides from the nucleotide sequence set forth in SEQ ID NO: 355; and the nucleotide sequence of the sense strand differs by no more than 5 nucleotides from the nucleotide sequence set forth in SEQ ID NO: 172;
(b) the nucleotide sequence of the antisense strand differs by no more than 5 nucleotides from the nucleotide sequence set forth in SEQ ID NO: 315; and the nucleotide sequence of the sense strand differs by no more than 5 nucleotides from the nucleotide sequence set forth in SEQ ID NO: 132;
(c) the nucleotide sequence of the antisense strand differs by no more than 5 nucleotides from the nucleotide sequence set forth in SEQ ID NO: 356; and the nucleotide sequence of the sense strand differs by no more than 5 nucleotides from the nucleotide sequence set forth in SEQ ID NO: 173; or
(d) the nucleotide sequence of the antisense strand differs by no more than 5 nucleotides from the nucleotide sequence set forth in SEQ ID NO: 321; and the nucleotide sequence of the sense strand differs by no more than 5 nucleotides from the nucleotide sequence set forth in SEQ ID NO: 138.

6.-10. (canceled)

11. A dsRNA agent for inhibiting expression of CIDEB,
wherein the dsRNA agent comprises a sense strand and an antisense strand forming a double stranded region, and
wherein the nucleotide sequence of the antisense strand differs by no more than 5 nucleotides from the nucleotide sequence of any one of the antisense strands of any one of dsRNA agents 1-482 set forth in Table 2 or Table 3; and
the nucleotide sequence of the sense strand differs by no more than 5 nucleotides from the nucleotide sequence of the sense strand of the corresponding dsRNA agent set forth in Table 2 or Table 3.

12. (canceled)

13. The dsRNA agent of claim 11, wherein
(a) the nucleotide sequence of the antisense strand differs by no more than 5 nucleotides from the nucleotide sequence of the antisense strand of dsRNA agent 129; and the nucleotide sequence of the sense strand differs by no more than 5 nucleotides from the nucleotide sequence of dsRNA agent 129;
(b) the nucleotide sequence of the antisense strand differs by no more than 5 nucleotides from the nucleotide sequence of the antisense strand of dsRNA agent 135; and the nucleotide sequence of the sense strand differs by no more than 5 nucleotides from the nucleotide sequence of dsRNA agent 135;
(c) the nucleotide sequence of the antisense strand differs by no more than 5 nucleotides from the nucleotide sequence of the antisense strand of dsRNA agent 169; and the nucleotide sequence of the sense strand differs by no more than 5 nucleotides from the nucleotide sequence of dsRNA agent 169; or
(d) the nucleotide sequence of the antisense strand differs by no more than 5 nucleotides from the nucleotide sequence of the antisense strand of dsRNA agent 170; and the nucleotide sequence of the sense strand differs by no more than 5 nucleotides from the nucleotide sequence of dsRNA agent 170.

14.-18. (canceled)

19. A dsRNA agent for inhibiting expression of CIDEB,
wherein the dsRNA agent comprises a sense strand and an antisense strand forming a double stranded region, and
wherein the sense strand comprises at least 15 (e.g., 16, 17, 18, 19, 20, 21) contiguous nucleotides of and differing by no more than 5 (e.g., 0, 1, 2, 3, 4, or 5 (e.g., 3 (e.g., 0, 1, 2, or 3))) nucleotides from nucleotides 50-90, 60-90, 68-106, 81-103, 138-190, 169-206, 232-254, 230-300, 280-312, 298-327, 444-498, 510-538, 521-558, 560-617, 692-778, 720-750, 740-780, 750-790, 760-780, 880-920, 890-940, 890-950, 920-970, 930-980, 961-1037, 1035-1060, 1105-1133, 1171-1213, 1216-1287, 1220-1270, 1230-1280, 1240-1290, 1250-1300, 1240-1270, 1240-1280, 1235-1270, 1245-1265, 1247-1267, 1252-1272, 1294-1346, 1366-1400, 1370-1410, 1360-1400, 1470-1510, 1410-1460, 1520-1560, 1580-1620, 1640-1680, 1640-1690, 1670-1710, 1700-1740,1700-1745, 1724-1753, 1750-1790, 1757-1812, 1770-1810, 1833-1864, 1880-1920, 1900-1940, 1900-1927, 1915-1966, 1920-1970, 1930-1970, 1930-1965, 1940-1970, 1940-1965, 1937-1957, 1942-1962, 1938-1958, 1943-1963, 2010-2060, 2020-2060, 2030-2070, 2082-2110, 2080-2120, 2090-2130, 2130-2170, 2143-2198, 2197-2225, 2210-2250, 2215-2260, 2240-2280, 2250-2280, 2250-2290, or 2260-2290 of SEQ ID NO: 1;
wherein the nucleotide sequence of the antisense strand comprises at least 15 contiguous nucleotides of and differing by no more than 5 nucleotides from the nucleotide sequence of the corresponding complementary nucleotide sequence of SEQ ID NO: 2.

20.-24. (canceled)

25. A dsRNA agent for inhibiting expression of CIDEB,
wherein the dsRNA agent comprises a sense strand and an antisense strand forming a double stranded region,
wherein the nucleotide sequence of the antisense strand comprises at least 15 contiguous nucleotides of and differing by no more than 5 nucleotides from the nucleotide sequence of any one of the antisense strands set forth in Table 2 or Table 3 or set forth in any one of SEQ ID NOS: 187-369, 602-657, 893-1131, or 1188-1191.

26.-70. (canceled)

71. A conjugate comprising the dsRNA agent of claim 1 and a heterologous moiety.

72.-95. (canceled)

96. A vector encoding the antisense strand, the sense strand, or both the antisense and sense strand of claim 1.

97. A carrier comprising the dsRNA agent of claim 1.

98.-99. (canceled)

100. A cell (or population of cells) comprising the dsRNA agent of claim 1.

101. A pharmaceutical composition comprising the dsRNA agent of claim 1, and a pharmaceutically acceptable excipient.

102. A kit comprising the dsRNA agent of claim 1.

103. A method of delivering a dsRNA agent to a cell, the method comprising introducing into a cell the dsRNA agent of claim 1, to thereby deliver the dsRNA agent into the cell.

104.-106. (canceled)

107. A method of reducing or inhibiting expression of CIDEB in a cell, the method comprising delivering into the cell the dsRNA agent of claim 1, to thereby reduce or inhibit expression of CIDEB in the cell.

108. (canceled)

109. A method of treating, ameliorating, or preventing a CIDEB associated disease in a subject, the method comprising administering to the subject the dsRNA agent of claim 1, to thereby treat, ameliorate, or prevent the CIDEB associated disease in the subject.

110.-116. (canceled)

117. A method of diagnosing a CIDEB associated disease in a subject, the method comprising
(a) isolating and purifying DNA, RNA, or protein, or having DNA, RNA, or protein isolated and purified, from a sample obtained from the subject;
(b) detecting, or having detected, the presence or absence of one or more somatic CIDEB mutation in the DNA, RNA, or protein,
wherein the presence of the one or more somatic mutation indicates that the subject has a CIDEB associated disease.

118.-126. (canceled)

127. A method of selecting a subject for administration of an inhibitory nucleic acid molecule that inhibits expression of CIDEB, the method comprising
(a) isolating and purifying DNA, RNA, or protein, or having DNA, RNA, or protein isolated and purified, from a sample obtained from the subject;
(b) detecting, or having detected, the presence or absence of one or more somatic CIDEB mutation in the DNA, RNA, or protein,
wherein the subject is selected for administration of the inhibitory nucleic acid molecule if the one or more somatic mutation is present.

128.-130. (canceled)

131. A method of treating, ameliorating, or preventing a CIDEB associated disease in a subject, the method comprising
(a) isolating and purifying DNA, RNA, or protein, or having DNA, RNA, or protein isolated and purified, from a sample obtained from the subject;
(b) detecting, or having detected, the presence or absence of one or more somatic CIDEB mutation in the DNA, RNA, or protein, and
(c) administering to the subject an inhibitory nucleic acid that inhibits expression of CIDEB if the one or more CIDEB somatic mutation is detected in the DNA, RNA, or protein.

132.-141. (canceled)

142. An in vitro method of screening a sample from a subject for one or more somatic CIDEB mutation, the method comprising
(a) isolating and purifying DNA, RNA, or protein from a sample obtained from the subject; and
(b) detecting the presence or absence of one or more somatic CIDEB mutation in the DNA, RNA, or protein.

143.-152. (canceled)

The application's sequence listing, which the Patent Office published only in electronic form, follows.

SEQUENCE LISTING (1199 sequences)

SEQ ID NO: 1 - RNA, 2307 nt, Homo sapiens
  source 1..2307: mol_type = genomic RNA
cccttccggtggagccagcgctgcgaccgcctgcagaaggttgactgcgtggtagggggcccagagcaagccgaaggcaagcacgatggcgctcaccagccggcccacccgcgccccgtgccgcccggagccccagcgggcgccccgcagccgtgccagcgtcacgctgtagcagccgagcatcagcccgaaaggaagcacgaaagcggtcagagtctccaggctcaggtgggcggcggcgtggaccggcgacgggtggcacagctggcatacgcggtccctccacaggtggcggtagacggcggccgggacggcgagcaacagggcggccagccagaccgccagcagcaggcggcgggccagggccgggctgcgcagccgaggcgccaggaaggggcgggtgactgcgaggcagcgctgcaggctgagcaggccggtgagcagcacgctggcgtacatgctgagcgcgcacacgtagtacaccgccttgcagcccgcctggcccagcggccaggcctgccgggtcaggaaggccacaaagagcggcgtgagcagcagcaccgcgccgtcggccagcgccaggtgcagcacaagcgtggccgccagcggtcgcccccgtgcaggccgccagcccgccaagctccacaccacgaagccgttgccaggcagccccagcagcgccgccagcagcaggaaggctgtgcctgtggcccgcgaagtcttccagctcagcagtgtctcgttccctgggggacggtagcagaccgacatccttctgggcctacaggacacagaaaaaaagtggggaagctgggggaccctacaaggatccttggcaggaaagcagggattgtgttcatttgagggtttcactgtcagtgagagtctcagcttccatgcaactgtccatcacggctgcaactgaaatcagagctgggacacagcgcaccagaagctaaagtcttgatgccatcaaaggacatccctgccccattcacatctctgtcacgtccactaatcggcaaaaggagaaaagtgagagaagatgacctaagtgtgactgcagcaggcagctctggaaaatgaagccagagcagtgagccagcccctcctccgaccaaggaggaaggaaagagcagccccagcacaggagagaaccacccagcccagaagttccagggaaggaactctccggtccaccatggagtacctctcagctctgaaccccagtgacttactcaggtcagtatctaatataagctcggagtttggacggagggtctggacctcagctccaccaccccagcgacctttccgtgtctgtgatcacaagcggaccatccggaaaggcctgacagctgccacccgccaggagctgctagccaaagcattggagaccctactgctgaatggagtgctaaccctggtgctagaggaggatggaactgcagtggacagtgaggacttcttccagctgctggaggatgacacgtgcctgatggtgttgcagtctggtcagagctggagccctacaaggagtggagtgctgtcatatggcctgggacgggagaggcccaagcacagcaaggacatcgcccgattcacctttgacgtgtacaagcaaaaccctcgagacctctttggcagcctgaatgtcaaagccacattctacgggctctactctatgagttgtgactttcaaggacttggcccaaagaaagtactcagggagctccttcgttggacctccacactgctgcaaggcctgggccatatgttgctgggaatttcctccacccttcgtcatgcagtggagggggctgagcagtggcagcagaagggccgcctccattcctactaaggggctctgagcttctgcccccagaatcattccaaccgacccactgcaaagactatgacagcatcaaatttcaggacctgcagacagtacaggctagataacccacccaatttccccactgtcctctgatcccctcgtgacagaacctttcagcataacgcctcacatcccaagtctatacccttacctgaagaatgctgttctttcctagccacctttctggcctcccacttgccctgaaaggccaagatcaagatgtcccccaggcatcttgatcccagcctgactgctgctacatctaatcccctaccaatgcctcctgtccctaaactccccagcatactgatgacagccctctctgactttaccttgagatctgtcttcatacccttcccctcaaactaacaaaaacatttccaataaaaatatcaaatatttaccactaa

SEQ ID NO: 2 - RNA, 2307 nt, Homo sapiens
  source 1..2307: mol_type = genomic RNA
ttagtggtaaatatttgatatttttattggaaatgtttttgttagtttgaggggaagggtatgaagacagatctcaaggtaaagtcagagagggctgtcatcagtatgctggggagtttagggacaggaggcattggtaggggattagatgtagcagcagtcaggctgggatcaagatgcctgggggacatcttgatcttggcctttcagggcaagtgggaggccagaaaggtggctaggaaagaacagcattcttcaggtaagggtatagacttgggatgtgaggcgttatgctgaaaggttctgtcacgaggggatcagaggacagtggggaaattgggtgggttatctagcctgtactgtctgcaggtcctgaaatttgatgctgtcatagtctttgcagtgggtcggttggaatgattctgggggcagaagctcagagccccttagtaggaatggaggcggcccttctgctgccactgctcagccccctccactgcatgacgaagggtggaggaaattcccagcaacatatggcccaggccttgcagcagtgtggaggtccaacgaaggagctccctgagtactttctttgggccaagtccttgaaagtcacaactcatagagtagagcccgtagaatgtggctttgacattcaggctgccaaagaggtctcgagggttttgcttgtacacgtcaaaggtgaatcgggcgatgtccttgctgtgcttgggcctctcccgtcccaggccatatgacagcactccactccttgtagggctccagctctgaccagactgcaacaccatcaggcacgtgtcatcctccagcagctggaagaagtcctcactgtccactgcagttccatcctcctctagcaccagggttagcactccattcagcagtagggtctccaatgctttggctagcagctcctggcgggtggcagctgtcaggcctttccggatggtccgcttgtgatcacagacacggaaaggtcgctggggtggtggagctgaggtccagaccctccgtccaaactccgagcttatattagatactgacctgagtaagtcactggggttcagagctgagaggtactccatggtggaccggagagttccttccctggaacttctgggctgggtggttctctcctgtgctggggctgctctttccttcctccttggtcggaggaggggctggctcactgctctggcttcattttccagagctgcctgctgcagtcacacttaggtcatcttctctcacttttctccttttgccgattagtggacgtgacagagatgtgaatggggcagggatgtcctttgatggcatcaagactttagcttctggtgcgctgtgtcccagctctgatttcagttgcagccgtgatggacagttgcatggaagctgagactctcactgacagtgaaaccctcaaatgaacacaatccctgctttcctgccaaggatccttgtagggtcccccagcttccccactttttttctgtgtcctgtaggcccagaaggatgtcggtctgctaccgtcccccagggaacgagacactgctgagctggaagacttcgcgggccacaggcacagccttcctgctgctggcggcgctgctggggctgcctggcaacggcttcgtggtgtggagcttggcgggctggcggcctgcacgggggcgaccgctggcggccacgcttgtgctgcacctggcgctggccgacggcgcggtgctgctgctcacgccgctctttgtggccttcctgacccggcaggcctggccgctgggccaggcgggctgcaaggcggtgtactacgtgtgcgcgctcagcatgtacgccagcgtgctgctcaccggcctgctcagcctgcagcgctgcctcgcagtcacccgccccttcctggcgcctcggctgcgcagcccggccctggcccgccgcctgctgctggcggtctggctggccgccctgttgctcgccgtcccggccgccgtctaccgccacctgtggagggaccgcgtatgccagctgtgccacccgtcgccggtccacgccgccgcccacctgagcctggagactctgaccgctttcgtgcttcctttcgggctgatgctcggctgctacagcgtgacgctggcacggctgcggggcgcccgctggggctccgggcggcacggggcgcgggtgggccggctggtgagcgccatcgtgcttgccttcggcttgctctgggccccctaccacgcagtcaaccttctgcaggcggtcgcagcgctggctccaccggaaggg

SEQ ID NO: 3 - protein, 219 aa, Homo sapiens
MEYLSALNPSDLLRSVSNISSEFGRRVWTSAPPPQRPFRVCDHKRTIRKGLTAATRQELLAKALETLLLNGVLTLVLEEDGTAVDSEDFFQLLEDDTCLMVLQSGQSWSPTRSGVLSYGLGRERPKHSKDIARFTFDVYKQNPRDLFGSLNVKATFYGLYSMSCDFQGLGPKKVLRELLRWTSTLLQGLGHMLLGISSTLRHAVEGAEQWQQKGRLHSY

SEQ ID NO: 4 - RNA, 21 nt, synthetic construct
  source 1..21: mol_type = other RNA
agagcaagccgaaggcaagca

SEQ ID NO: 5 - RNA, 21 nt, synthetic construct
  source 1..21: mol_type = other RNA
aagccgaaggcaagcacgata

SEQ ID NO: 6 - RNA, 21 nt, synthetic construct
  source 1..21: mol_type = other RNA
agccgaaggcaagcacgatga

SEQ ID NO: 7 - RNA, 21 nt, synthetic construct
  source 1..21: mol_type = other RNA
ccgaaggcaagcacgatggca

SEQ ID NO: 8 - RNA, 21 nt, synthetic construct
  source 1..21: mol_type = other RNA
cgaaggcaagcacgatggcga

SEQ ID NO: 9 - RNA, 21 nt, synthetic construct
  source 1..21: mol_type = other RNA
ggcaagcacgatggcgctcaa

SEQ ID NO: 10 - RNA, 21 nt, synthetic construct
  source 1..21: mol_type = other RNA
gcaagcacgatggcgctcaca

SEQ ID NO: 11 - RNA, 21 nt, synthetic construct
  source 1..21: mol_type = other RNA
caagcacgatggcgctcacca

SEQ ID NO: 12 - RNA, 21 nt, synthetic construct
  source 1..21: mol_type = other RNA
aagcacgatggcgctcaccaa

SEQ ID NO: 13 - RNA, 21 nt, synthetic construct
  source 1..21: mol_type = other RNA
acgatggcgctcaccagccga

SEQ ID NO: 14 - RNA, 21 nt, synthetic construct
  source 1..21: mol_type = other RNA
ccccgcagccgtgccagcgta

SEQ ID NO: 15 - RNA, 21 nt, synthetic construct
  source 1..21: mol_type = other RNA
gcagccgtgccagcgtcacga

SEQ ID NO: 16 - RNA, 21 nt, synthetic construct
  source 1..21: mol_type = other RNA
cagccgtgccagcgtcacgca

SEQ ID NO: 17 - RNA, 21 nt, synthetic construct
  source 1..21: mol_type = other RNA
agccgtgccagcgtcacgcta

SEQ ID NO: 18 - RNA, 21 nt, synthetic construct
  source 1..21: mol_type = other RNA
gccgtgccagcgtcacgctga

SEQ ID NO: 19 - RNA, 21 nt, synthetic construct
  source 1..21: mol_type = other RNA
cgtgccagcgtcacgctgtaa

SEQ ID NO: 20 - RNA, 21 nt, synthetic construct
  source 1..21: mol_type = other RNA
gccagcgtcacgctgtagcaa

SEQ ID NO: 21 - RNA, 21 nt, synthetic construct
  source 1..21: mol_type = other RNA
ccagcgtcacgctgtagcaga

SEQ ID NO: 22 - RNA, 21 nt, synthetic construct
  source 1..21: mol_type = other RNA
cagcgtcacgctgtagcagca

SEQ ID NO: 23 - RNA, 21 nt, synthetic construct
  source 1..21: mol_type = other RNA
gcgtcacgctgtagcagccga

SEQ ID NO: 24 - RNA, 21 nt, synthetic construct
  source 1..21: mol_type = other RNA
cgtcacgctgtagcagccgaa

SEQ ID NO: 25 - RNA, 21 nt, synthetic construct
  source 1..21: mol_type = other RNA
gtcacgctgtagcagccgaga

SEQ ID NO: 26 - RNA, 21 nt, synthetic construct
  source 1..21: mol_type = other RNA
cacgctgtagcagccgagcaa

SEQ ID NO: 27 - RNA, 21 nt, synthetic construct
  source 1..21: mol_type = other RNA
acgctgtagcagccgagcata

SEQ ID NO: 28 - RNA, 21 nt, synthetic construct
  source 1..21: mol_type = other RNA
gctgtagcagccgagcatcaa

SEQ ID NO: 29 - RNA, 21 nt, synthetic construct
  source 1..21: mol_type = other RNA
agccgagcatcagcccgaaaa

SEQ ID NO: 30 - RNA, 21 nt, synthetic construct
  source 1..21: mol_type = other RNA
cgagcatcagcccgaaaggaa

SEQ ID NO: 31 - RNA, 21 nt, synthetic construct
  source 1..21: mol_type = other RNA
cagcccgaaaggaagcacgaa

SEQ ID NO: 32 - RNA, 21 nt, synthetic construct
  source 1..21: mol_type = other RNA
agcccgaaaggaagcacgaaa

SEQ ID NO: 33 - RNA, 21 nt, synthetic construct
  source 1..21: mol_type = other RNA
gcccgaaaggaagcacgaaaa

SEQ ID NO: 34 - RNA, 21 nt, synthetic construct
  source 1..21: mol_type = other RNA
cggcggcgtggaccggcgaca

SEQ ID NO: 35 - RNA, 21 nt, synthetic construct
  source 1..21: mol_type = other RNA
ggcggcgtggaccggcgacga

SEQ ID NO: 36 - RNA, 21 nt, synthetic construct
  source 1..21: mol_type = other RNA
gcggcgtggaccggcgacgga

SEQ ID NO: 37 - RNA, 21 nt, synthetic construct
  source 1..21: mol_type = other RNA
gtggaccggcgacgggtggca

SEQ ID NO: 38 - RNA, 21 nt, synthetic construct
  source 1..21: mol_type = other RNA
tggaccggcgacgggtggcaa

SEQ ID NO: 39 - RNA, 21 nt, synthetic construct
  source 1..21: mol_type = other RNA
ggaccggcgacgggtggcaca

SEQ ID NO: 40 - RNA, 21 nt, synthetic construct
  source 1..21: mol_type = other RNA
gaccggcgacgggtggcacaa

SEQ ID NO: 41 - RNA, 21 nt, synthetic construct
  source 1..21: mol_type = other RNA
cggcgacgggtggcacagcta

SEQ ID NO: 42 - RNA, 21 nt, synthetic construct
  source 1..21: mol_type = other RNA
gcgacgggtggcacagctgga

SEQ ID NO: 43 - RNA, 21 nt, synthetic construct
  source 1..21: mol_type = other RNA
ggtggcacagctggcatacga

SEQ ID NO: 44 - RNA, 21 nt, synthetic construct
  source 1..21: mol_type = other RNA
gtggcacagctggcatacgca

SEQ ID NO: 45 - RNA, 21 nt, synthetic construct
  source 1..21: mol_type = other RNA
tggcacagctggcatacgcga

SEQ ID NO: 46 - RNA, 21 nt, synthetic construct
  source 1..21: mol_type = other RNA
cctccacaggtggcggtagaa

SEQ ID NO: 47 - RNA, 21 nt, synthetic construct
  source 1..21: mol_type = other RNA
tccacaggtggcggtagacga

SEQ ID NO: 48 - RNA, 21 nt, synthetic construct
  source 1..21: mol_type = other RNA
cacaggtggcggtagacggca

SEQ ID NO: 49 - RNA, 21 nt, synthetic construct
  source 1..21: mol_type = other RNA
gtggcggtagacggcggccga

SEQ ID NO: 50 - RNA, 21 nt, synthetic construct
  source 1..21: mol_type = other RNA
cggccgggacggcgagcaaca

SEQ ID NO: 51 - RNA, 21 nt, synthetic construct
  source 1..21: mol_type = other RNA
ggccgggacggcgagcaacaa

SEQ ID NO: 52 - RNA, 21 nt, synthetic construct
  source 1..21: mol_type = other RNA
ctggcgtacatgctgagcgca

SEQ ID NO: 53 - RNA, 21 nt, synthetic construct
  source 1..21: mol_type = other RNA
tggcgtacatgctgagcgcga

SEQ ID NO: 54 - RNA, 21 nt, synthetic construct
  source 1..21: mol_type = other RNA
ggcgtacatgctgagcgcgca

SEQ ID NO: 55 - RNA, 21 nt, synthetic construct
  source 1..21: mol_type = other RNA
gcgtacatgctgagcgcgcaa

SEQ ID NO: 56 - RNA, 21 nt, synthetic construct
  source 1..21: mol_type = other RNA
gctgagcgcgcacacgtagta

SEQ ID NO: 57 - RNA, 21 nt, synthetic construct
  source 1..21: mol_type = other RNA
ctgagcgcgcacacgtagtaa

SEQ ID NO: 58 - RNA, 21 nt, synthetic construct
  source 1..21: mol_type = other RNA
gagcgcgcacacgtagtacaa

SEQ ID NO: 59 - RNA, 21 nt, synthetic construct
  source 1..21: mol_type = other RNA
cgcgcacacgtagtacaccga

SEQ ID NO: 60 - RNA, 21 nt, synthetic construct
  source 1..21: mol_type = other RNA
gcgcacacgtagtacaccgca

SEQ ID NO: 61 - RNA, 21 nt, synthetic construct
  source 1..21: mol_type = other RNA
cgcacacgtagtacaccgcca

SEQ ID NO: 62 - RNA, 21 nt, synthetic construct
  source 1..21: mol_type = other RNA
gcacacgtagtacaccgccta

SEQ ID NO: 63 - RNA, 21 nt, synthetic construct
  source 1..21: mol_type = other RNA
cacacgtagtacaccgcctta

SEQ ID NO: 64 - RNA, 21 nt, synthetic construct
  source 1..21: mol_type = other RNA
acacgtagtacaccgccttga

SEQ ID NO: 65 - RNA, 21 nt, synthetic construct
  source 1..21: mol_type = other RNA
acgtagtacaccgccttgcaa

SEQ ID NO: 66 - RNA, 21 nt, synthetic construct
  source 1..21: mol_type = other RNA
cgtagtacaccgccttgcaga

SEQ ID NO: 67 - RNA, 21 nt, synthetic construct
  source 1..21: mol_type = other RNA
gtagtacaccgccttgcagca

SEQ ID NO: 68 - RNA, 21 nt, synthetic construct
  source 1..21: mol_type = other RNA
gcctgccgggtcaggaaggca

SEQ ID NO: 69 - RNA, 21 nt, synthetic construct
  source 1..21: mol_type = other RNA
caggaaggccacaaagagcga

SEQ ID NO: 70 - RNA, 21 nt, synthetic construct
  source 1..21: mol_type = other RNA
ggaaggccacaaagagcggca

SEQ ID NO: 71 - RNA, 21 nt, synthetic construct
  source 1..21: mol_type = other RNA
gaaggccacaaagagcggcga

SEQ ID NO: 72 - RNA, 21 nt, synthetic construct
  source 1..21: mol_type = other RNA
aaggccacaaagagcggcgta

SEQ ID NO: 73 - RNA, 21 nt, synthetic construct
  source 1..21: mol_type = other RNA
aggccacaaagagcggcgtga

SEQ ID NO: 74 - RNA, 21 nt, synthetic construct
  source 1..21: mol_type = other RNA
ggccacaaagagcggcgtgaa

SEQ ID NO: 75 - RNA, 21 nt, synthetic construct
  source 1..21: mol_type = other RNA
ccacaaagagcggcgtgagca

SEQ ID NO: 76 - RNA, 21 nt, synthetic construct
  source 1..21: mol_type = other RNA
cacaaagagcggcgtgagcaa

SEQ ID NO: 77 - RNA, 21 nt, synthetic construct
  source 1..21: mol_type = other RNA
agcaccgcgccgtcggccaga

SEQ ID NO: 78 - RNA, 21 nt, synthetic construct
  source 1..21: mol_type = other RNA
cgcgccgtcggccagcgccaa

SEQ ID NO: 79 - RNA, 21 nt, synthetic construct
  source 1..21: mol_type = other RNA
gcgccgtcggccagcgccaga

SEQ ID NO: 80 - RNA, 21 nt, synthetic construct
  source 1..21: mol_type = other RNA
cagcacaagcgtggccgccaa

SEQ ID NO: 81 - RNA, 21 nt, synthetic construct
  source 1..21: mol_type = other RNA
agcacaagcgtggccgccaga

SEQ ID NO: 82 - RNA, 21 nt, synthetic construct
  source 1..21: mol_type = other RNA
gcacaagcgtggccgccagca

SEQ ID NO: 83 - RNA, 21 nt, synthetic construct
  source 1..21: mol_type = other RNA
caagcgtggccgccagcggta

SEQ ID NO: 84 - RNA, 21 nt, synthetic construct
  source 1..21: mol_type = other RNA
aagcgtggccgccagcggtca

SEQ ID NO: 85 - RNA, 21 nt, synthetic construct
  source 1..21: mol_type = other RNA
agcgtggccgccagcggtcga

SEQ ID NO: 86 - RNA, 21 nt, synthetic construct
  source 1..21: mol_type = other RNA
gcgtggccgccagcggtcgca

SEQ ID NO: 87 - RNA, 21 nt, synthetic construct
  source 1..21: mol_type = other RNA
ggctgtgcctgtggcccgcga

SEQ ID NO: 88 - RNA, 21 nt, synthetic construct
  source 1..21: mol_type = other RNA
gcctgtggcccgcgaagtcta

SEQ ID NO: 89 - RNA, 21 nt, synthetic construct
  source 1..21: mol_type = other RNA
ctgtggcccgcgaagtcttca

SEQ ID NO: 90 - RNA, 21 nt, synthetic construct
  source 1..21: mol_type = other RNA
gcccgcgaagtcttccagcta

SEQ ID NO: 91 - RNA, 21 nt, synthetic construct
  source 1..21: mol_type = other RNA
cccgcgaagtcttccagctca

SEQ ID NO: 92 - RNA, 21 nt, synthetic construct
  source 1..21: mol_type = other RNA
ccgcgaagtcttccagctcaa

SEQ ID NO: 93 - RNA, 21 nt, synthetic construct
  source 1..21: mol_type = other RNA
tccagctcagcagtgtctcga

SEQ ID NO: 94 - RNA, 21 nt, synthetic construct
  source 1..21: mol_type = other RNA
cagctcagcagtgtctcgtta

SEQ ID NO: 95 - RNA, 21 nt, synthetic construct
  source 1..21: mol_type = other RNA
gcgcaccagaagctaaagtca

SEQ ID NO: 96 - RNA, 21 nt, synthetic construct
  source 1..21: mol_type = other RNA
cagaagctaaagtcttgatga

SEQ ID NO: 97 - RNA, 21 nt, synthetic construct
  source 1..21: mol_type = other RNA
agaagctaaagtcttgatgca

SEQ ID NO: 98 - RNA, 21 nt, synthetic construct
  source 1..21: mol_type = other RNA
gaagctaaagtcttgatgcca

SEQ ID NO: 99 - RNA, 21 nt, synthetic construct
  source 1..21: mol_type = other RNA
aagctaaagtcttgatgccaa

SEQ ID NO: 100 - RNA, 21 nt, synthetic construct
  source 1..21: mol_type = other RNA
gctaaagtcttgatgccatca

SEQ ID NO: 101 - RNA, 21 nt, synthetic construct
  source 1..21: mol_type = other RNA
gatgccatcaaaggacatcca

SEQ ID NO: 102 - RNA, 21 nt, synthetic construct
  source 1..21: mol_type = other RNA
atgccatcaaaggacatccca

SEQ ID NO: 103 - RNA, 21 nt, synthetic construct
  source 1..21: mol_type = other RNA
gccatcaaaggacatccctga

SEQ ID NO: 104 - RNA, 21 nt, synthetic construct
  source 1..21: mol_type = other RNA
catctctgtcacgtccactaa

SEQ ID NO: 105 - RNA, 21 nt, synthetic construct
  source 1..21: mol_type = other RNA
atctctgtcacgtccactaaa

SEQ ID NO: 106 - RNA, 21 nt, synthetic construct
  source 1..21: mol_type = other RNA
tctctgtcacgtccactaata

SEQ ID NO: 107 - RNA, 21 nt, synthetic construct
  source 1..21: mol_type = other RNA
ctctgtcacgtccactaatca

SEQ ID NO: 108 - RNA, 21 nt, synthetic construct
  source 1..21: mol_type = other RNA
tctgtcacgtccactaatcga

SEQ ID NO: 109 - RNA, 21 nt, synthetic construct
  source 1..21: mol_type = other RNA
ctgtcacgtccactaatcgga

SEQ ID NO: 110 - RNA, 21 nt, synthetic construct
  source 1..21: mol_type = other RNA
tgtcacgtccactaatcggca

SEQ ID NO: 111 - RNA, 21 nt, synthetic construct
  source 1..21: mol_type = other RNA
gtcacgtccactaatcggcaa

SEQ ID NO: 112 - RNA, 21 nt, synthetic construct
  source 1..21: mol_type = other RNA
tcacgtccactaatcggcaaa

SEQ ID NO: 113 - RNA, 21 nt, synthetic construct
  source 1..21: mol_type = other RNA
cacgtccactaatcggcaaaa

SEQ ID NO: 114 - RNA, 21 nt, synthetic construct
  source 1..21: mol_type = other RNA
cgtccactaatcggcaaaaga

SEQ ID NO: 115 - RNA, 21 nt, synthetic construct
  source 1..21: mol_type = other RNA
gtccactaatcggcaaaagga

SEQ ID NO: 116 - RNA, 21 nt, synthetic construct
  source 1..21: mol_type = other RNA
tccactaatcggcaaaaggaa

SEQ ID NO: 117 - RNA, 21 nt, synthetic construct
  source 1..21: mol_type = other RNA
ccactaatcggcaaaaggaga

SEQ ID NO: 118 - RNA, 21 nt, synthetic construct
  source 1..21: mol_type = other RNA
cactaatcggcaaaaggagaa

SEQ ID NO: 119 - RNA, 21 nt, synthetic construct
  source 1..21: mol_type = other RNA
actaatcggcaaaaggagaaa

SEQ ID NO: 120 - RNA, 21 nt, synthetic construct
  source 1..21: mol_type = other RNA
gagaagatgacctaagtgtga

SEQ ID NO: 121 - RNA, 21 nt, synthetic construct
  source 1..21: mol_type = other RNA
tcctccgaccaaggaggaaga

SEQ ID NO: 122 - RNA, 21 nt, synthetic construct
  source 1..21: mol_type = other RNA
ccagggaaggaactctccgga

SEQ ID NO: 123 - RNA, 21 nt, synthetic construct
  source 1..21: mol_type = other RNA
cagggaaggaactctccggta

SEQ ID NO: 124 - RNA, 21 nt, synthetic construct
  source 1..21: mol_type = other RNA
aggaactctccggtccaccaa

SEQ ID NO: 125 - RNA, 21 nt, synthetic construct
  source 1..21: mol_type = other RNA
ggaactctccggtccaccata

SEQ ID NO: 126 - RNA, 21 nt, synthetic construct
  source 1..21: mol_type = other RNA
actctccggtccaccatggaa

SEQ ID NO: 127 - RNA, 21 nt, synthetic construct
  source 1..21: mol_type = other RNA
ctccggtccaccatggagtaa

SEQ ID NO: 128 - RNA, 21 nt, synthetic construct
  source 1..21: mol_type = other RNA
tgaaccccagtgacttactca

SEQ ID NO: 129 - RNA, 21 nt, synthetic construct
  source 1..21: mol_type = other RNA
gtgacttactcaggtcagtaa

SEQ ID NO: 130 - RNA, 21 nt, synthetic construct
  source 1..21: mol_type = other RNA
gacttactcaggtcagtatca

SEQ ID NO: 131 - RNA, 21 nt, synthetic construct
  source 1..21: mol_type = other RNA
cttactcaggtcagtatctaa

SEQ ID NO: 132 - RNA, 21 nt, synthetic construct
  source 1..21: mol_type = other RNA
cagtatctaatataagctcga

SEQ ID NO: 133 - RNA, 21 nt, synthetic construct
  source 1..21: mol_type = other RNA
gtatctaatataagctcggaa

SEQ ID NO: 134 - RNA, 21 nt, synthetic construct
  source 1..21: mol_type = other RNA
tatctaatataagctcggaga

SEQ ID NO: 135 - RNA, 21 nt, synthetic construct
  source 1..21: mol_type = other RNA
atctaatataagctcggagta

SEQ ID NO: 136 - RNA, 21 nt, synthetic construct
  source 1..21: mol_type = other RNA
tctaatataagctcggagtta

SEQ ID NO: 137 - RNA, 21 nt, synthetic construct
  source 1..21: mol_type = other RNA
ctaatataagctcggagttta

SEQ ID NO: 138 - RNA, 21 nt, synthetic construct
  source 1..21: mol_type = other RNA
taatataagctcggagtttga

SEQ ID NO: 139 - RNA, 21 nt, synthetic construct
  source 1..21: mol_type = other RNA
atataagctcggagtttggaa

SEQ ID NO: 140 - RNA, 21 nt, synthetic construct
  source 1..21: mol_type = other RNA
tataagctcggagtttggaca

SEQ ID NO: 141 - RNA, 21 nt, synthetic construct
  source 1..21: mol_type = other RNA
ataagctcggagtttggacga

SEQ ID NO: 142 - RNA, 21 nt, synthetic construct
  source 1..21: mol_type = other RNA
gctcggagtttggacggagga

SEQ ID NO: 143 - RNA, 21 nt, synthetic construct
  source 1..21: mol_type = other RNA
ggagtttggacggagggtcta

SEQ ID NO: 144 - RNA, 21 nt, synthetic construct
  source 1..21: mol_type = other RNA
caccccagcgacctttccgta

SEQ ID NO: 145 - RNA, 21 nt, synthetic construct
  source 1..21: mol_type = other RNA
gtctgtgatcacaagcggaca

SEQ ID NO: 146 - RNA, 21 nt, synthetic construct
  source 1..21: mol_type = other RNA
tctgtgatcacaagcggacca

SEQ ID NO: 147 - RNA, 21 nt, synthetic construct
  source 1..21: mol_type = other RNA
ctgtgatcacaagcggaccaa

SEQ ID NO: 148 - RNA, 21 nt, synthetic construct
  source 1..21: mol_type = other RNA
tgtgatcacaagcggaccata

SEQ ID NO: 149 - RNA, 21 nt, synthetic construct
  source 1..21: mol_type = other RNA
gtgatcacaagcggaccatca

SEQ ID NO: 150 - RNA, 21 nt, synthetic construct
  source 1..21: mol_type = other RNA
aggagctgctagccaaagcaa

SEQ ID NO: 151 - RNA, 21 nt, synthetic construct
  source 1..21: mol_type = other RNA
agctgctagccaaagcattga

SEQ ID NO: 152 - RNA, 21 nt, synthetic construct
  source 1..21: mol_type = other RNA
ctgctagccaaagcattggaa

SEQ ID NO: 153 - RNA, 21 nt, synthetic construct
  source 1..21: mol_type = other RNA
tgctagccaaagcattggaga

SEQ ID NO: 154 - RNA, 21 nt, synthetic construct
  source 1..21: mol_type = other RNA
ctagccaaagcattggagaca

SEQ ID NO: 155 - RNA, 21 nt, synthetic construct
  source 1..21: mol_type = other RNA
tagccaaagcattggagacca

SEQ ID NO: 156 - RNA, 21 nt, synthetic construct
  source 1..21: mol_type = other RNA
ggagctccttcgttggaccta

SEQ ID NO: 157 - RNA, 21 nt, synthetic construct
  source 1..21: mol_type = other RNA
gagctccttcgttggacctca

SEQ ID NO: 158 - RNA, 21 nt, synthetic construct
  source 1..21: mol_type = other RNA
agctccttcgttggacctcca

SEQ ID NO: 159 - RNA, 21 nt, synthetic construct
  source 1..21: mol_type = other RNA
aggcctgggccatatgttgca

SEQ ID NO: 160 - RNA, 21 nt, synthetic construct
  source 1..21: mol_type = other RNA
gcctgggccatatgttgctga

SEQ ID NO: 161 - RNA, 21 nt, synthetic construct
  source 1..21: mol_type = other RNA
ctgggccatatgttgctggga

SEQ ID NO: 162 - RNA, 21 nt, synthetic construct
  source 1..21: mol_type = other RNA
tgggccatatgttgctgggaa

SEQ ID NO: 163 - RNA, 21 nt, synthetic construct
  source 1..21: mol_type = other RNA
atgttgctgggaatttcctca

SEQ ID NO: 164 - RNA, 21 nt, synthetic construct
  source 1..21: mol_type = other RNA
ctgggaatttcctccacccta

SEQ ID NO: 165 - RNA, 21 nt, synthetic construct
  source 1..21: mol_type = other RNA
ttcctccacccttcgtcatga

SEQ ID NO: 166 - RNA, 21 nt, synthetic construct
  source 1..21: mol_type = other RNA
aagggccgcctccattcctaa

SEQ ID NO: 167 - RNA, 21 nt, synthetic construct
  source 1..21: mol_type = other RNA
ggccgcctccattcctactaa

SEQ ID NO: 168 - RNA, 21 nt, synthetic construct
  source 1..21: mol_type = other RNA
actgcaaagactatgacagca

SEQ ID NO: 169 - RNA, 21 nt, synthetic construct
  source 1..21: mol_type = other RNA
cagcatcaaatttcaggacca

SEQ ID NO: 170 - RNA, 21 nt, synthetic construct
  source 1..21: mol_type = other RNA
tcaggacctgcagacagtaca

SEQ ID NO: 171 - RNA, 21 nt, synthetic construct
  source 1..21: mol_type = other RNA
gcagacagtacaggctagata

SEQ ID NO: 172 - RNA, 21 nt, synthetic construct
  source 1..21: mol_type = other RNA
cagacagtacaggctagataa

SEQ ID NO: 173 - RNA, 21 nt, synthetic construct
  source 1..21: mol_type = other RNA
agacagtacaggctagataaa

SEQ ID NO: 174 - RNA, 21 nt, synthetic construct
  source 1..21: mol_type = other RNA
tcccacttgccctgaaaggca

SEQ ID NO: 175 - RNA, 21 nt, synthetic construct
  source 1..21: mol_type = other RNA
ctgctgctacatctaatccca

SEQ ID NO: 176 - RNA, 21 nt, synthetic construct
  source 1..21: mol_type = other RNA
tgctgctacatctaatcccca

SEQ ID NO: 177 - RNA, 21 nt, synthetic construct
  source 1..21: mol_type = other RNA
gctgctacatctaatccccta

SEQ ID NO: 178 - RNA, 21 nt, synthetic construct
  source 1..21: mol_type = other RNA
acatctaatcccctaccaata

SEQ ID NO: 179 - RNA, 21 nt, synthetic construct
  source 1..21: mol_type = other RNA
atctaatcccctaccaatgca

SEQ ID NO: 180 - RNA, 21 nt, synthetic construct
  source 1..21: mol_type = other RNA
cccctaccaatgcctcctgta

SEQ ID NO: 181 - RNA, 21 nt, synthetic construct
  source 1..21: mol_type = other RNA
ccctaccaatgcctcctgtca

SEQ ID NO: 182 - RNA, 21 nt, synthetic construct
  source 1..21: mol_type = other RNA
accaatgcctcctgtccctaa

SEQ ID NO: 183 - RNA, 21 nt, synthetic construct
  source 1..21: mol_type = other RNA
ccaatgcctcctgtccctaaa

SEQ ID NO: 184 - RNA, 21 nt, synthetic construct
  source 1..21: mol_type = other RNA
atgcctcctgtccctaaacta

SEQ ID NO: 185 - RNA, 21 nt, synthetic construct
  source 1..21: mol_type = other RNA
tgcctcctgtccctaaactca

SEQ ID NO: 186 - RNA, 21 nt, synthetic construct
  source 1..21: mol_type = other RNA
tactgatgacagccctctcta

SEQ ID NO: 187 - RNA, 23 nt, synthetic construct
  source 1..23: mol_type = other RNA
tgcttgccttcggcttgctctgg

SEQ ID NO: 188 - RNA, 23 nt, synthetic construct
  source 1..23: mol_type = other RNA
tatcgtgcttgccttcggcttgc

SEQ ID NO: 189 - RNA, 23 nt, synthetic construct
  source 1..23: mol_type = other RNA
tcatcgtgcttgccttcggcttg

SEQ ID NO: 190 - RNA, 23 nt, synthetic construct
  source 1..23: mol_type = other RNA
tgccatcgtgcttgccttcggct

SEQ ID NO: 191 - RNA, 23 nt, synthetic construct
  source 1..23: mol_type = other RNA
tcgccatcgtgcttgccttcggc

SEQ ID NO: 192 - RNA, 23 nt, synthetic construct
  source 1..23: mol_type = other RNA
ttgagcgccatcgtgcttgcctt

SEQ ID NO: 193 - RNA, 23 nt, synthetic construct
  source 1..23: mol_type = other RNA
tgtgagcgccatcgtgcttgcct

SEQ ID NO: 194 - RNA, 23 nt, synthetic construct
  source 1..23: mol_type = other RNA
tggtgagcgccatcgtgcttgcc

SEQ ID NO: 195 - RNA, 23 nt, synthetic construct
  source 1..23: mol_type = other RNA
ttggtgagcgccatcgtgcttgc

SEQ ID NO: 196 - RNA, 23 nt, synthetic construct
  source 1..23: mol_type = other RNA
tcggctggtgagcgccatcgtgc

SEQ ID NO: 197 - RNA, 23 nt, synthetic construct
  source 1..23: mol_type = other RNA
tacgctggcacggctgcggggcg

SEQ ID NO: 198 - RNA, 23 nt, synthetic construct
  source 1..23: mol_type = other RNA
tcgtgacgctggcacggctgcgg

SEQ ID NO: 199 - RNA, 23 nt, synthetic construct
  source 1..23: mol_type = other RNA
tgcgtgacgctggcacggctgcg

SEQ ID NO: 200 - RNA, 23 nt, synthetic construct
  source 1..23: mol_type = other RNA
tagcgtgacgctggcacggctgc

SEQ ID NO: 201 - RNA, 23 nt, synthetic construct
  source 1..23: mol_type = other RNA
tcagcgtgacgctggcacggctg

SEQ ID NO: 202 - RNA, 23 nt, synthetic construct
  source 1..23: mol_type = other RNA
ttacagcgtgacgctggcacggc

SEQ ID NO: 203 - RNA, 23 nt, synthetic construct
  source 1..23: mol_type = other RNA
ttgctacagcgtgacgctggcac

SEQ ID NO: 204 - RNA, 23 nt, synthetic construct
  source 1..23: mol_type = other RNA
tctgctacagcgtgacgctggca

SEQ ID NO: 205 - RNA, 23 nt, synthetic construct
  source 1..23: mol_type = other RNA
tgctgctacagcgtgacgctggc

SEQ ID NO: 206 - RNA, 23 nt, synthetic construct
  source 1..23: mol_type = other RNA
tcggctgctacagcgtgacgctg

SEQ ID NO: 207 - RNA, 23 nt, synthetic construct
  source 1..23: mol_type = other RNA
ttcggctgctacagcgtgacgct

SEQ ID NO: 208 - RNA, 23 nt, synthetic construct
  source 1..23: mol_type = other RNA
tctcggctgctacagcgtgacgc

SEQ ID NO: 209 - RNA, 23 nt, synthetic construct
  source 1..23: mol_type = other RNA
ttgctcggctgctacagcgtgac

SEQ ID NO: 210 - RNA, 23 nt, synthetic construct
  source 1..23: mol_type = other RNA
tatgctcggctgctacagcgtga

SEQ ID NO: 211 - RNA, 23 nt, synthetic construct
  source 1..23: mol_type = other RNA
ttgatgctcggctgctacagcgt

SEQ ID NO: 212 - RNA, 23 nt, synthetic construct
  source 1..23: mol_type = other RNA
ttttcgggctgatgctcggctgc

SEQ ID NO: 213 - RNA, 23 nt, synthetic construct
  source 1..23: mol_type = other RNA
ttcctttcgggctgatgctcggc

SEQ ID NO: 214 - RNA, 23 nt, synthetic construct
  source 1..23: mol_type = other RNA
ttcgtgcttcctttcgggctgat

SEQ ID NO: 215 - RNA, 23 nt, synthetic construct
  source 1..23: mol_type = other RNA
tttcgtgcttcctttcgggctga

SEQ ID NO: 216 - RNA, 23 nt, synthetic construct
  source 1..23: mol_type = other RNA
ttttcgtgcttcctttcgggctg

SEQ ID NO: 217 - RNA, 23 nt, synthetic construct
  source 1..23: mol_type = other RNA
tgtcgccggtccacgccgccgcc

SEQ ID NO: 218 - RNA, 23 nt, synthetic construct
  source 1..23: mol_type = other RNA
tcgtcgccggtccacgccgccgc

SEQ ID NO: 219 - RNA, 23 nt, synthetic construct
  source 1..23: mol_type = other RNA
tccgtcgccggtccacgccgccg

SEQ ID NO: 220 - RNA, 23 nt, synthetic construct
  source 1..23: mol_type = other RNA
tgccacccgtcgccggtccacgc

SEQ ID NO: 221 - RNA, 23 nt, synthetic construct
  source 1..23: mol_type = other RNA
ttgccacccgtcgccggtccacg

SEQ ID NO: 222 - RNA, 23 nt, synthetic construct
  source 1..23: mol_type = other RNA
tgtgccacccgtcgccggtccac

SEQ ID NO: 223 - RNA, 23 nt, synthetic construct
  source 1..23: mol_type = other RNA
ttgtgccacccgtcgccggtcca

SEQ ID NO: 224 - RNA, 23 nt, synthetic construct
  source 1..23: mol_type = other RNA
tagctgtgccacccgtcgccggt

SEQ ID NO: 225 - RNA, 23 nt, synthetic construct
  source 1..23: mol_type = other RNA
tccagctgtgccacccgtcgccg

SEQ ID NO: 226 - RNA, 23 nt, synthetic construct
  source 1..23: mol_type = other RNA
tcgtatgccagctgtgccacccg

SEQ ID NO: 227 - RNA, 23 nt, synthetic construct
  source 1..23: mol_type = other RNA
tgcgtatgccagctgtgccaccc

SEQ ID NO: 228 - RNA, 23 nt, synthetic construct
  source 1..23: mol_type = other RNA
tcgcgtatgccagctgtgccacc

SEQ ID NO: 229 - RNA, 23 nt, synthetic construct
  source 1..23: mol_type = other RNA
ttctaccgccacctgtggaggga

SEQ ID NO: 230 - RNA, 23 nt, synthetic construct
  source 1..23: mol_type = other RNA
tcgtctaccgccacctgtggagg

SEQ ID NO: 231 - RNA, 23 nt, synthetic construct
  source 1..23: mol_type = other RNA
tgccgtctaccgccacctgtgga

SEQ ID NO: 232 - RNA, 23 nt, synthetic construct
  source 1..23: mol_type = other RNA
tcggccgccgtctaccgccacct

SEQ ID NO: 233 - RNA, 23 nt, synthetic construct
  source 1..23: mol_type = other RNA
tgttgctcgccgtcccggccgcc

SEQ ID NO: 234 - RNA, 23 nt, synthetic construct
  source 1..23: mol_type = other RNA
ttgttgctcgccgtcccggccgc

SEQ ID NO: 235 - RNA, 23 nt, synthetic construct
  source 1..23: mol_type = other RNA
tgcgctcagcatgtacgccagcg

SEQ ID NO: 236 - RNA, 23 nt, synthetic construct
  source 1..23: mol_type = other RNA
tcgcgctcagcatgtacgccagc

SEQ ID NO: 237 - RNA, 23 nt, synthetic construct
  source 1..23: mol_type = other RNA
tgcgcgctcagcatgtacgccag

SEQ ID NO: 238 - RNA, 23 nt, synthetic construct
  source 1..23: mol_type = other RNA
ttgcgcgctcagcatgtacgcca

SEQ ID NO: 239 - RNA, 23 nt, synthetic construct
  source 1..23: mol_type = other RNA
tactacgtgtgcgcgctcagcat

SEQ ID NO: 240 - RNA, 23 nt, synthetic construct
  source 1..23: mol_type = other RNA
ttactacgtgtgcgcgctcagca

SEQ ID NO: 241 - RNA, 23 nt, synthetic construct
  source 1..23: mol_type = other RNA
ttgtactacgtgtgcgcgctcag

SEQ ID NO: 242 - RNA, 23 nt, synthetic construct
  source 1..23: mol_type = other RNA
tcggtgtactacgtgtgcgcgct

SEQ ID NO: 243 - RNA, 23 nt, synthetic construct
  source 1..23: mol_type = other RNA
tgcggtgtactacgtgtgcgcgc

SEQ ID NO: 244 - RNA, 23 nt, synthetic construct
  source 1..23: mol_type = other RNA
tggcggtgtactacgtgtgcgcg

SEQ ID NO: 245 - RNA, 23 nt, synthetic construct
  source 1..23: mol_type = other RNA
taggcggtgtactacgtgtgcgc

SEQ ID NO: 246 - RNA, 23 nt, synthetic construct
  source 1..23: mol_type = other RNA
taaggcggtgtactacgtgtgcg

SEQ ID NO: 247 - RNA, 23 nt, synthetic construct
  source 1..23: mol_type = other RNA
tcaaggcggtgtactacgtgtgc

SEQ ID NO: 248 - RNA, 23 nt, synthetic construct
  source 1..23: mol_type = other RNA
ttgcaaggcggtgtactacgtgt

SEQ ID NO: 249 - RNA, 23 nt, synthetic construct
  source 1..23: mol_type = other RNA
tctgcaaggcggtgtactacgtg

SEQ ID NO: 250 - RNA, 23 nt, synthetic construct
  source 1..23: mol_type = other RNA
tgctgcaaggcggtgtactacgt

SEQ ID NO: 251 - RNA, 23 nt, synthetic construct
  source 1..23: mol_type = other RNA
tgccttcctgacccggcaggcct

SEQ ID NO: 252 - RNA, 23 nt, synthetic construct
  source 1..23: mol_type = other RNA
tcgctctttgtggccttcctgac

SEQ ID NO: 253 - RNA, 23 nt, synthetic construct
  source 1..23: mol_type = other RNA
tgccgctctttgtggccttcctg

SEQ ID NO: 254 - RNA, 23 nt, synthetic construct
  source 1..23: mol_type = other RNA
tcgccgctctttgtggccttcct

SEQ ID NO: 255 - RNA, 23 nt, synthetic construct
  source 1..23: mol_type = other RNA
tacgccgctctttgtggccttcc

SEQ ID NO: 256 - RNA, 23 nt, synthetic construct
  source 1..23: mol_type = other RNA
tcacgccgctctttgtggccttc

SEQ ID NO: 257 - RNA, 23 nt, synthetic construct
  source 1..23: mol_type = other RNA
ttcacgccgctctttgtggcctt

SEQ ID NO: 258 - RNA, 23 nt, synthetic construct
  source 1..23: mol_type = other RNA
tgctcacgccgctctttgtggcc

SEQ ID NO: 259 - RNA, 23 nt, synthetic construct
  source 1..23: mol_type = other RNA
ttgctcacgccgctctttgtggc

SEQ ID NO: 260 - RNA, 23 nt, synthetic construct
  source 1..23: mol_type = other RNA
tctggccgacggcgcggtgctgc

SEQ ID NO: 261 - RNA, 23 nt, synthetic construct
  source 1..23: mol_type = other RNA
ttggcgctggccgacggcgcggt

SEQ ID NO: 262 - RNA, 23 nt, synthetic construct
  source 1..23: mol_type = other RNA
tctggcgctggccgacggcgcgg

SEQ ID NO: 263 - RNA, 23 nt, synthetic construct
  source 1..23: mol_type = other RNA
ttggcggccacgcttgtgctgca

SEQ ID NO: 264 - RNA, 23 nt, synthetic construct
  source 1..23: mol_type = other RNA
tctggcggccacgcttgtgctgc

SEQ ID NO: 265 - RNA, 23 nt, synthetic construct
  source 1..23: mol_type = other RNA
tgctggcggccacgcttgtgctg

SEQ ID NO: 266 - RNA, 23 nt, synthetic construct
  source 1..23: mol_type = other RNA
taccgctggcggccacgcttgtg

SEQ ID NO: 267 - RNA, 23 nt, synthetic construct
  source 1..23: mol_type = other RNA
tgaccgctggcggccacgcttgt

SEQ ID NO: 268 - RNA, 23 nt, synthetic construct
  source 1..23: mol_type = other RNA
tcgaccgctggcggccacgcttg

SEQ ID NO: 269 - RNA, 23 nt, synthetic construct
  source 1..23: mol_type = other RNA
tgcgaccgctggcggccacgctt

SEQ ID NO: 270 - RNA, 23 nt, synthetic construct
  source 1..23: mol_type = other RNA
tcgcgggccacaggcacagcctt

SEQ ID NO: 271 - RNA, 23 nt, synthetic construct
  source 1..23: mol_type = other RNA
tagacttcgcgggccacaggcac

SEQ ID NO: 272 - RNA, 23 nt, synthetic construct
  source 1..23: mol_type = other RNA
tgaagacttcgcgggccacaggc

SEQ ID NO: 273 - RNA, 23 nt, synthetic construct
  source 1..23: mol_type = other RNA
tagctggaagacttcgcgggcca

SEQ ID NO: 274 - RNA, 23 nt, synthetic construct
  source 1..23: mol_type = other RNA
tgagctggaagacttcgcgggcc

SEQ ID NO: 275 - RNA, 23 nt, synthetic construct
  source 1..23: mol_type = other RNA
ttgagctggaagacttcgcgggc

SEQ ID NO: 276 - RNA, 23 nt, synthetic construct
  source 1..23: mol_type = other RNA
tcgagacactgctgagctggaag

SEQ ID NO: 277 - RNA, 23 nt, synthetic construct
  source 1..23: mol_type = other RNA
taacgagacactgctgagctgga

SEQ ID NO: 278 - RNA, 23 nt, synthetic construct
  source 1..23: mol_type = other RNA
tgactttagcttctggtgcgctg

SEQ ID NO: 279 - RNA, 23 nt, synthetic construct
  source 1..23: mol_type = other RNA
tcatcaagactttagcttctggt

SEQ ID NO: 280 - RNA, 23 nt, synthetic construct
  source 1..23: mol_type = other RNA
tgcatcaagactttagcttctgg

SEQ ID NO: 281 - RNA, 23 nt, synthetic construct
  source 1..23: mol_type = other RNA
tggcatcaagactttagcttctg

SEQ ID NO: 282 - RNA, 23 nt, synthetic construct
  source 1..23: mol_type = other RNA
ttggcatcaagactttagcttct

SEQ ID NO: 283 - RNA, 23 nt, synthetic construct
  source 1..23: mol_type = other RNA
tgatggcatcaagactttagctt

SEQ ID NO: 284 - RNA, 23 nt, synthetic construct
  source 1..23: mol_type = other RNA
tggatgtcctttgatggcatcaa

SEQ ID NO: 285 - RNA, 23 nt, synthetic construct
  source 1..23: mol_type = other RNA
tgggatgtcctttgatggcatca

SEQ ID NO: 286 - RNA, 23 nt, synthetic construct
  source 1..23: mol_type = other RNA
tcagggatgtcctttgatggcat

SEQ ID NO: 287 - RNA, 23 nt, synthetic construct
  source 1..23: mol_type = other RNA
ttagtggacgtgacagagatgtg

SEQ ID NO: 288 - RNA, 23 nt, synthetic construct
  source 1..23: mol_type = other RNA
tttagtggacgtgacagagatgt

SEQ ID NO: 289 - RNA, 23 nt, synthetic construct
  source 1..23: mol_type = other RNA
tattagtggacgtgacagagatg

SEQ ID NO: 290 - RNA, 23 nt, synthetic construct
  source 1..23: mol_type = other RNA
tgattagtggacgtgacagagat

SEQ ID NO: 291 - RNA, 23 nt, synthetic construct
  source 1..23: mol_type = other RNA
tcgattagtggacgtgacagaga

SEQ ID NO: 292 - RNA, 23 nt, synthetic construct
  source 1..23: mol_type = other RNA
tccgattagtggacgtgacagag

SEQ ID NO: 293 - RNA, 23 nt, synthetic construct
  source 1..23: mol_type = other RNA
tgccgattagtggacgtgacaga

SEQ ID NO: 294 - RNA, 23 nt, synthetic construct
  source 1..23: mol_type = other RNA
ttgccgattagtggacgtgacag

SEQ ID NO: 295 - RNA, 23 nt, synthetic construct
  source 1..23: mol_type = other RNA
tttgccgattagtggacgtgaca

SEQ ID NO: 296 - RNA, 23 nt, synthetic construct
  source 1..23: mol_type = other RNA
ttttgccgattagtggacgtgac

SEQ ID NO: 297 - RNA, 23 nt, synthetic construct
  source 1..23: mol_type = other RNA
tcttttgccgattagtggacgtg

SEQ ID NO: 298 - RNA, 23 nt, synthetic construct
  source 1..23: mol_type = other RNA
tccttttgccgattagtggacgt

SEQ ID NO: 299 - RNA, 23 nt, synthetic construct
  source 1..23: mol_type = other RNA
ttccttttgccgattagtggacg

SEQ ID NO: 300 - RNA, 23 nt, synthetic construct
  source 1..23: mol_type = other RNA
tctccttttgccgattagtggac

SEQ ID NO: 301 - RNA, 23 nt, synthetic construct
  source 1..23: mol_type = other RNA
ttctccttttgccgattagtgga

SEQ ID NO: 302 - RNA, 23 nt, synthetic construct
  source 1..23: mol_type = other RNA
tttctccttttgccgattagtgg

SEQ ID NO: 303 - RNA, 23 nt, synthetic construct
  source 1..23: mol_type = other RNA
tcacacttaggtcatcttctctc

SEQ ID NO: 304 - RNA, 23 nt, synthetic construct
  source 1..23: mol_type = other RNA
tcttcctccttggtcggaggagg

SEQ ID NO: 305 - RNA, 23 nt, synthetic construct
  source 1..23: mol_type = other RNA
tccggagagttccttccctggaa

SEQ ID NO: 306 - RNA, 23 nt, synthetic construct
  source 1..23: mol_type = other RNA
taccggagagttccttccctgga

SEQ ID NO: 307 - RNA, 23 nt, synthetic construct
  source 1..23: mol_type = other RNA
ttggtggaccggagagttccttc

SEQ ID NO: 308 - RNA, 23 nt, synthetic construct
  source 1..23: mol_type = other RNA
tatggtggaccggagagttcctt

SEQ ID NO: 309 - RNA, 23 nt, synthetic construct
  source 1..23: mol_type = other RNA
ttccatggtggaccggagagttc

SEQ ID NO: 310 - RNA, 23 nt, synthetic construct
  source 1..23: mol_type = other RNA
ttactccatggtggaccggagag

SEQ ID NO: 311 - RNA, 23 nt, synthetic construct
  source 1..23: mol_type = other RNA
tgagtaagtcactggggttcaga

SEQ ID NO: 312 - RNA, 23 nt, synthetic construct
  source 1..23: mol_type = other RNA
ttactgacctgagtaagtcactg

SEQ ID NO: 313 - RNA, 23 nt, synthetic construct
  source 1..23: mol_type = other RNA
tgatactgacctgagtaagtcac

SEQ ID NO: 314 - RNA, 23 nt, synthetic construct
  source 1..23: mol_type = other RNA
ttagatactgacctgagtaagtc

SEQ ID NO: 315 - RNA, 23 nt, synthetic construct
  source 1..23: mol_type = other RNA
tcgagcttatattagatactgac

SEQ ID NO: 316 - RNA, 23 nt, synthetic construct
  source 1..23: mol_type = other RNA
ttccgagcttatattagatactg

SEQ ID NO: 317 - RNA, 23 nt, synthetic construct
  source 1..23: mol_type = other RNA
tctccgagcttatattagatact

SEQ ID NO: 318 - RNA, 23 nt, synthetic construct
  source 1..23: mol_type = other RNA
tactccgagcttatattagatac

SEQ ID NO: 319 - RNA, 23 nt, synthetic construct
  source 1..23: mol_type = other RNA
taactccgagcttatattagata

SEQ ID NO: 320 - RNA, 23 nt, synthetic construct
  source 1..23: mol_type = other RNA
taaactccgagcttatattagat

SEQ ID NO: 321 - RNA, 23 nt, synthetic construct
  source 1..23: mol_type = other RNA
tcaaactccgagcttatattaga

SEQ ID NO: 322 - RNA, 23 nt, synthetic construct
  source 1..23: mol_type = other RNA
ttccaaactccgagcttatatta

SEQ ID NO: 323 - RNA, 23 nt, synthetic construct
  source 1..23: mol_type = other RNA
tgtccaaactccgagcttatatt

SEQ ID NO: 324 - RNA, 23 nt, synthetic construct
  source 1..23: mol_type = other RNA
tcgtccaaactccgagcttatat

SEQ ID NO: 325 - RNA, 23 nt, synthetic construct
  source 1..23: mol_type = other RNA
tcctccgtccaaactccgagctt

SEQ ID NO: 326 - RNA, 23 nt, synthetic construct
  source 1..23: mol_type = other RNA
tagaccctccgtccaaactccga

SEQ ID NO: 327 - RNA, 23 nt, synthetic construct
  source 1..23: mol_type = other RNA
tacggaaaggtcgctggggtggt

SEQ ID NO: 328 - RNA, 23 nt, synthetic construct
  source 1..23: mol_type = other RNA
tgtccgcttgtgatcacagacac

SEQ ID NO: 329 - RNA, 23 nt, synthetic construct
  source 1..23: mol_type = other RNA
tggtccgcttgtgatcacagaca

SEQ ID NO: 330 - RNA, 23 nt, synthetic construct
  source 1..23: mol_type = other RNA
ttggtccgcttgtgatcacagac

SEQ ID NO: 331 - RNA, 23 nt, synthetic construct
  source 1..23: mol_type = other RNA
tatggtccgcttgtgatcacaga

SEQ ID NO: 332 - RNA, 23 nt, synthetic construct
  source 1..23: mol_type = other RNA
tgatggtccgcttgtgatcacag

SEQ ID NO: 333 - RNA, 23 nt, synthetic construct
  source 1..23: mol_type = other RNA
ttgctttggctagcagctcctgg

SEQ ID NO: 334 - RNA, 23 nt, synthetic construct
  source 1..23: mol_type = other RNA
tcaatgctttggctagcagctcc

SEQ ID NO: 335 - RNA, 23 nt, synthetic construct
  source 1..23: mol_type = other RNA
ttccaatgctttggctagcagct

SEQ ID NO: 336 - RNA, 23 nt, synthetic construct
  source 1..23: mol_type = other RNA
tctccaatgctttggctagcagc

SEQ ID NO: 337 - RNA, 23 nt, synthetic construct
  source 1..23: mol_type = other RNA
tgtctccaatgctttggctagca

SEQ ID NO: 338 - RNA, 23 nt, synthetic construct
  source 1..23: mol_type = other RNA
tggtctccaatgctttggctagc

SEQ ID NO: 339 - RNA, 23 nt, synthetic construct
  source 1..23: mol_type = other RNA
taggtccaacgaaggagctccct

SEQ ID NO: 340 - RNA, 23 nt, synthetic construct
  source 1..23: mol_type = other RNA
tgaggtccaacgaaggagctccc

SEQ ID NO: 341 - RNA, 23 nt, synthetic construct
  source 1..23: mol_type = other RNA
tggaggtccaacgaaggagctcc

SEQ ID NO: 342 - RNA, 23 nt, synthetic construct
  source 1..23: mol_type = other RNA
tgcaacatatggcccaggccttg

SEQ ID NO: 343 - RNA, 23 nt, synthetic construct
  source 1..23: mol_type = other RNA
tcagcaacatatggcccaggcct

SEQ ID NO: 344 - RNA, 23 nt, synthetic construct
  source 1..23: mol_type = other RNA
tcccagcaacatatggcccaggc

SEQ ID NO: 345 - RNA, 23 nt, synthetic construct
  source 1..23: mol_type = other RNA
ttcccagcaacatatggcccagg

SEQ ID NO: 346 - RNA, 23 nt, synthetic construct
  source 1..23: mol_type = other RNA
tgaggaaattcccagcaacatat

SEQ ID NO: 347 - RNA, 23 nt, synthetic construct
  source 1..23: mol_type = other RNA
tagggtggaggaaattcccagca

SEQ ID NO: 348 - RNA, 23 nt, synthetic construct
  source 1..23: mol_type = other RNA
tcatgacgaagggtggaggaaat

SEQ ID NO: 349 - RNA, 23 nt, synthetic construct
  source 1..23: mol_type = other RNA
ttaggaatggaggcggcccttct

SEQ ID NO: 350 - RNA, 23 nt, synthetic construct
  source 1..23: mol_type = other RNA
ttagtaggaatggaggcggccct

SEQ ID NO: 351 - RNA, 23 nt, synthetic construct
  source 1..23: mol_type = other RNA
tgctgtcatagtctttgcagtgg

SEQ ID NO: 352 - RNA, 23 nt, synthetic construct
  source 1..23: mol_type = other RNA
tggtcctgaaatttgatgctgtc

SEQ ID NO: 353 - RNA, 23 nt, synthetic construct
  source 1..23: mol_type = other RNA
tgtactgtctgcaggtcctgaaa

SEQ ID NO: 354 - RNA, 23 nt, synthetic construct
  source 1..23: mol_type = other RNA
tatctagcctgtactgtctgcag

SEQ ID NO: 355 - RNA, 23 nt, synthetic construct
  source 1..23: mol_type = other RNA
ttatctagcctgtactgtctgca

SEQ ID NO: 356 - RNA, 23 nt, synthetic construct
  source 1..23: mol_type = other RNA
tttatctagcctgtactgtctgc

SEQ ID NO: 357 - RNA, 23 nt, synthetic construct
  source 1..23: mol_type = other RNA
tgcctttcagggcaagtgggagg

SEQ ID NO: 358 - RNA, 23 nt, synthetic construct
  source 1..23: mol_type = other RNA
tgggattagatgtagcagcagtc

SEQ ID NO: 359 - RNA, 23 nt, synthetic construct
  source 1..23: mol_type = other RNA
tggggattagatgtagcagcagt

SEQ ID NO: 360 - RNA, 23 nt, synthetic construct
  source 1..23: mol_type = other RNA
taggggattagatgtagcagcag

SEQ ID NO: 361 - RNA, 23 nt, synthetic construct
  source 1..23: mol_type = other RNA
tattggtaggggattagatgtag

SEQ ID NO: 362 - RNA, 23 nt, synthetic construct
  source 1..23: mol_type = other RNA
tgcattggtaggggattagatgt

SEQ ID NO: 363 - RNA, 23 nt, synthetic construct
  source 1..23: mol_type = other RNA
tacaggaggcattggtaggggat

SEQ ID NO: 364 - RNA, 23 nt, synthetic construct
  source 1..23: mol_type = other RNA
tgacaggaggcattggtagggga

SEQ ID NO: 365 - RNA, 23 nt, synthetic construct
  source 1..23: mol_type = other RNA
ttagggacaggaggcattggtag

SEQ ID NO: 366 - RNA, 23 nt, synthetic construct
  source 1..23: mol_type = other RNA
tttagggacaggaggcattggta

SEQ ID NO: 367 - RNA, 23 nt, synthetic construct
  source 1..23: mol_type = other RNA
tagtttagggacaggaggcattg

SEQ ID NO: 368 - RNA, 23 nt, synthetic construct
  source 1..23: mol_type = other RNA
tgagtttagggacaggaggcatt

SEQ ID NO: 369 - RNA, 23 nt, synthetic construct
  source 1..23: mol_type = other RNA
tagagagggctgtcatcagtatg

SEQ ID NO: 370 - RNA, 23 nt, Homo sapiens
  source 1..23: mol_type = genomic RNA
ccagagcaagccgaaggcaagca

SEQ ID NO: 371 - RNA, 23 nt, Homo sapiens
  source 1..23: mol_type = genomic RNA
gcaagccgaaggcaagcacgatg

SEQ ID NO: 372 - RNA, 23 nt, Homo sapiens
  source 1..23: mol_type = genomic RNA
caagccgaaggcaagcacgatgg

SEQ ID NO: 373 - RNA, 23 nt, Homo sapiens
  source 1..23: mol_type = genomic RNA
agccgaaggcaagcacgatggcg

SEQ ID NO: 374 - RNA, 23 nt, Homo sapiens
  source 1..23: mol_type = genomic RNA
gccgaaggcaagcacgatggcgc

SEQ ID NO: 375 - RNA, 23 nt, Homo sapiens
  source 1..23: mol_type = genomic RNA
aaggcaagcacgatggcgctcac

SEQ ID NO: 376 - RNA, 23 nt, Homo sapiens
  source 1..23: mol_type = genomic RNA
aggcaagcacgatggcgctcacc

SEQ ID NO: 377 - RNA, 23 nt, Homo sapiens
  source 1..23: mol_type = genomic RNA
ggcaagcacgatggcgctcacca

SEQ ID NO: 378 - RNA, 23 nt, Homo sapiens
  source 1..23: mol_type = genomic RNA
gcaagcacgatggcgctcaccag

SEQ ID NO: 379 - RNA, 23 nt, Homo sapiens
  source 1..23: mol_type = genomic RNA
gcacgatggcgctcaccagccgg

SEQ ID NO: 380 - RNA, 23 nt, Homo sapiens
  source 1..23: mol_type = genomic RNA
cgccccgcagccgtgccagcgtc

SEQ ID NO: 381 - RNA, 23 nt, Homo sapiens
  source 1..23: mol_type = genomic RNA
ccgcagccgtgccagcgtcacgc

SEQ ID NO: 382 - RNA, 23 nt, Homo sapiens
  source 1..23: mol_type = genomic RNA
cgcagccgtgccagcgtcacgct

SEQ ID NO: 383 - RNA, 23 nt, Homo sapiens
  source 1..23: mol_type = genomic RNA
gcagccgtgccagcgtcacgctg

SEQ ID NO: 384 - RNA, 23 nt, Homo sapiens
  source 1..23: mol_type = genomic RNA
cagccgtgccagcgtcacgctgt

SEQ ID NO: 385 - RNA, 23 nt, Homo sapiens
  source 1..23: mol_type = genomic RNA
gccgtgccagcgtcacgctgtag

SEQ ID NO: 386 - RNA, 23 nt, Homo sapiens
  source 1..23: mol_type = genomic RNA
gtgccagcgtcacgctgtagcag

SEQ ID NO: 387 - RNA, 23 nt, Homo sapiens
  source 1..23: mol_type = genomic RNA
tgccagcgtcacgctgtagcagc

SEQ ID NO: 388 - RNA, 23 nt, Homo sapiens
  source 1..23: mol_type = genomic RNA
gccagcgtcacgctgtagcagcc

SEQ ID NO: 389 - RNA, 23 nt, Homo sapiens
  source 1..23: mol_type = genomic RNA
cagcgtcacgctgtagcagccga

SEQ ID NO: 390 - RNA, 23 nt, Homo sapiens
  source 1..23: mol_type = genomic RNA
agcgtcacgctgtagcagccgag

SEQ ID NO: 391 - RNA, 23 nt, Homo sapiens
  source 1..23: mol_type = genomic RNA
gcgtcacgctgtagcagccgagc

SEQ ID NO: 392 - RNA, 23 nt, Homo sapiens
  source 1..23: mol_type = genomic RNA
gtcacgctgtagcagccgagcat

SEQ ID NO: 393 - RNA, 23 nt, Homo sapiens
  source 1..23: mol_type = genomic RNA
tcacgctgtagcagccgagcatc

SEQ ID NO: 394 - RNA, 23 nt, Homo sapiens
  source 1..23: mol_type = genomic RNA
acgctgtagcagccgagcatcag

SEQ ID NO: 395 - RNA, 23 nt, Homo sapiens
  source 1..23: mol_type = genomic RNA
gcagccgagcatcagcccgaaag

SEQ ID NO: 396 - RNA, 23 nt, Homo sapiens
  source 1..23: mol_type = genomic RNA
gccgagcatcagcccgaaaggaa

SEQ ID NO: 397 - RNA, 23 nt, Homo sapiens
  source 1..23: mol_type = genomic RNA
atcagcccgaaaggaagcacgaa

SEQ ID NO: 398 - RNA, 23 nt, Homo sapiens
  source 1..23: mol_type = genomic RNA
tcagcccgaaaggaagcacgaaa

SEQ ID NO: 399 - RNA, 23 nt, Homo sapiens
  source 1..23: mol_type = genomic RNA
cagcccgaaaggaagcacgaaag

SEQ ID NO: 400 - RNA, 23 nt, Homo sapiens
  source 1..23: mol_type = genomic RNA
ggcggcggcgtggaccggcgacg

SEQ ID NO: 401 - RNA, 23 nt, Homo sapiens
  source 1..23: mol_type = genomic RNA
gcggcggcgtggaccggcgacgg

SEQ ID NO: 402 - RNA, 23 nt, Homo sapiens
  source 1..23: mol_type = genomic RNA
cggcggcgtggaccggcgacggg

SEQ ID NO: 403 - RNA, 23 nt, Homo sapiens
  source 1..23: mol_type = genomic RNA
gcgtggaccggcgacgggtggca

SEQ ID NO: 404 - RNA, 23 nt, Homo sapiens
  source 1..23: mol_type = genomic RNA
cgtggaccggcgacgggtggcac

SEQ ID NO: 405 - RNA, 23 nt, Homo sapiens
  source 1..23: mol_type = genomic RNA
gtggaccggcgacgggtggcaca

SEQ ID NO: 406 - RNA, 23 nt, Homo sapiens
  source 1..23: mol_type = genomic RNA
tggaccggcgacgggtggcacag

SEQ ID NO: 407 - RNA, 23 nt, Homo sapiens
  source 1..23: mol_type = genomic RNA
accggcgacgggtggcacagctg

SEQ ID NO: 408 - RNA, 23 nt, Homo sapiens
  source 1..23: mol_type = genomic RNA
cggcgacgggtggcacagctggc

SEQ ID NO: 409 - RNA, 23 nt, Homo sapiens
  source 1..23: mol_type = genomic RNA
cgggtggcacagctggcatacgc

SEQ ID NO: 410 - RNA, 23 nt, Homo sapiens
  source 1..23: mol_type = genomic RNA
gggtggcacagctggcatacgcg

SEQ ID NO: 411 - RNA, 23 nt, Homo sapiens
  source 1..23: mol_type = genomic RNA
ggtggcacagctggcatacgcgg

SEQ ID NO: 412 - RNA, 23 nt, Homo sapiens
  source 1..23: mol_type = genomic RNA
tccctccacaggtggcggtagac

SEQ ID NO: 413 - RNA, 23 nt, Homo sapiens
  source 1..23: mol_type = genomic RNA
cctccacaggtggcggtagacgg

SEQ ID NO: 414 - RNA, 23 nt, Homo sapiens
  source 1..23: mol_type = genomic RNA
tccacaggtggcggtagacggcg

SEQ ID NO: 415 - RNA, 23 nt, Homo sapiens
  source 1..23: mol_type = genomic RNA
aggtggcggtagacggcggccgg

SEQ ID NO: 416 - RNA, 23 nt, Homo sapiens
  source 1..23: mol_type = genomic RNA
ggcggccgggacggcgagcaaca

SEQ ID NO: 417 - RNA, 23 nt, Homo sapiens
  source 1..23: mol_type = genomic RNA
gcggccgggacggcgagcaacag

SEQ ID NO: 418 - RNA, 23 nt, Homo sapiens
  source 1..23: mol_type = genomic RNA
cgctggcgtacatgctgagcgcg

SEQ ID NO: 419 - RNA, 23 nt, Homo sapiens
  source 1..23: mol_type = genomic RNA
gctggcgtacatgctgagcgcgc

SEQ ID NO: 420 - RNA, 23 nt, Homo sapiens
  source 1..23: mol_type = genomic RNA
ctggcgtacatgctgagcgcgca

SEQ ID NO: 421 - RNA, 23 nt, Homo sapiens
  source 1..23: mol_type = genomic RNA
tggcgtacatgctgagcgcgcac

SEQ ID NO: 422 - RNA, 23 nt, Homo sapiens
  source 1..23: mol_type = genomic RNA
atgctgagcgcgcacacgtagta

SEQ ID NO: 423 - RNA, 23 nt, Homo sapiens
  source 1..23: mol_type = genomic RNA
tgctgagcgcgcacacgtagtac

SEQ ID NO: 424 - RNA, 23 nt, Homo sapiens
  source 1..23: mol_type = genomic RNA
ctgagcgcgcacacgtagtacac

SEQ ID NO: 425 - RNA, 23 nt, Homo sapiens
  source 1..23: mol_type = genomic RNA
agcgcgcacacgtagtacaccgc

SEQ ID NO: 426 - RNA, 23 nt, Homo sapiens
  source 1..23: mol_type = genomic RNA
gcgcgcacacgtagtacaccgcc

SEQ ID NO: 427 - RNA, 23 nt, Homo sapiens
  source 1..23: mol_type = genomic RNA
cgcgcacacgtagtacaccgcct

SEQ ID NO: 428 - RNA, 23 nt, Homo sapiens
  source 1..23: mol_type = genomic RNA
gcgcacacgtagtacaccgcctt

SEQ ID NO: 429 - RNA, 23 nt, Homo sapiens
  source 1..23: mol_type = genomic RNA
cgcacacgtagtacaccgccttg

SEQ ID NO: 430 - RNA, 23 nt, Homo sapiens
  source 1..23: mol_type = genomic RNA
gcacacgtagtacaccgccttgc

SEQ ID NO: 431 - RNA, 23 nt, Homo sapiens
  source 1..23: mol_type = genomic RNA
acacgtagtacaccgccttgcag

SEQ ID NO: 432 - RNA, 23 nt, Homo sapiens
  source 1..23: mol_type = genomic RNA
cacgtagtacaccgccttgcagc

SEQ ID NO: 433 - RNA, 23 nt, Homo sapiens
  source 1..23: mol_type = genomic RNA
acgtagtacaccgccttgcagcc

SEQ ID NO: 434 - RNA, 23 nt, Homo sapiens
  source 1..23: mol_type = genomic RNA
aggcctgccgggtcaggaaggcc

SEQ ID NO: 435 - RNA, 23 nt, Homo sapiens
  source 1..23: mol_type = genomic RNA
gtcaggaaggccacaaagagcgg

SEQ ID NO: 436 - RNA, 23 nt, Homo sapiens
  source 1..23: mol_type = genomic RNA
caggaaggccacaaagagcggcg

SEQ ID NO: 437 - RNA, 23 nt, Homo sapiens
  source 1..23: mol_type = genomic RNA
aggaaggccacaaagagcggcgt

SEQ ID NO: 438 - RNA, 23 nt, Homo sapiens
  source 1..23: mol_type = genomic RNA
ggaaggccacaaagagcggcgtg

SEQ ID NO: 439 - RNA, 23 nt, Homo sapiens
  source 1..23: mol_type = genomic RNA
gaaggccacaaagagcggcgtga

SEQ ID NO: 440 - RNA, 23 nt, Homo sapiens
  source 1..23: mol_type = genomic RNA
aaggccacaaagagcggcgtgag

SEQ ID NO: 441 - RNA, 23 nt, Homo sapiens
  source 1..23: mol_type = genomic RNA
ggccacaaagagcggcgtgagca

SEQ ID NO: 442 - RNA, 23 nt, Homo sapiens
  source 1..23: mol_type = genomic RNA
gccacaaagagcggcgtgagcag

SEQ ID NO: 443 - RNA, 23 nt, Homo sapiens
  source 1..23: mol_type = genomic RNA
gcagcaccgcgccgtcggccagc

SEQ ID NO: 444 - RNA, 23 nt, Homo sapiens
  source 1..23: mol_type = genomic RNA
accgcgccgtcggccagcgccag

SEQ ID NO: 445 - RNA, 23 nt, Homo sapiens
  source 1..23: mol_type = genomic RNA
ccgcgccgtcggccagcgccagg

SEQ ID NO: 446 - RNA, 23 nt, Homo sapiens
  source 1..23: mol_type = genomic RNA
tgcagcacaagcgtggccgccag

SEQ ID NO: 447 - RNA, 23 nt, Homo sapiens
  source 1..23: mol_type = genomic RNA
gcagcacaagcgtggccgccagc

SEQ ID NO: 448 - RNA, 23 nt, Homo sapiens
  source 1..23: mol_type = genomic RNA
cagcacaagcgtggccgccagcg

SEQ ID NO: 449 - RNA, 23 nt, Homo sapiens
  source 1..23: mol_type = genomic RNA
cacaagcgtggccgccagcggtc

SEQ ID NO: 450 - RNA, 23 nt, Homo sapiens
  source 1..23: mol_type = genomic RNA
acaagcgtggccgccagcggtcg

SEQ ID NO: 451 - RNA, 23 nt, Homo sapiens
  source 1..23: mol_type = genomic RNA
caagcgtggccgccagcggtcgc

SEQ ID NO: 452 - RNA, 23 nt, Homo sapiens
  source 1..23: mol_type = genomic RNA
aagcgtggccgccagcggtcgcc

SEQ ID NO: 453 - RNA, 23 nt, Homo sapiens
  source 1..23: mol_type = genomic RNA
aaggctgtgcctgtggcccgcga

SEQ ID NO: 454 - RNA, 23 nt, Homo sapiens
  source 1..23: mol_type = genomic RNA
gtgcctgtggcccgcgaagtctt

SEQ ID NO: 455 - RNA, 23 nt, Homo sapiens
  source 1..23: mol_type = genomic RNA
gcctgtggcccgcgaagtcttcc

SEQ ID NO: 456 - RNA, 23 nt, Homo sapiens
  source 1..23: mol_type = genomic RNA
tggcccgcgaagtcttccagctc

SEQ ID NO: 457 - RNA, 23 nt, Homo sapiens
  source 1..23: mol_type = genomic RNA
ggcccgcgaagtcttccagctca

SEQ ID NO: 458 - RNA, 23 nt, Homo sapiens
  source 1..23: mol_type = genomic RNA
gcccgcgaagtcttccagctcag

SEQ ID NO: 459 - RNA, 23 nt, Homo sapiens
  source 1..23: mol_type = genomic RNA
cttccagctcagcagtgtctcgt

SEQ ID NO: 460 - RNA, 23 nt, Homo sapiens
  source 1..23: mol_type = genomic RNA
tccagctcagcagtgtctcgttc

SEQ ID NO: 461 - RNA, 23 nt, Homo sapiens
  source 1..23: mol_type = genomic RNA
cagcgcaccagaagctaaagtct

SEQ ID NO: 462 - RNA, 23 nt, Homo sapiens
  source 1..23: mol_type = genomic RNA
accagaagctaaagtcttgatgc

SEQ ID NO: 463 - RNA, 23 nt, Homo sapiens
  source 1..23: mol_type = genomic RNA
ccagaagctaaagtcttgatgcc

SEQ ID NO: 464 - RNA, 23 nt, Homo sapiens
  source 1..23: mol_type = genomic RNA
cagaagctaaagtcttgatgcca

SEQ ID NO: 465 - RNA, 23 nt, Homo sapiens
  source 1..23: mol_type = genomic RNA
agaagctaaagtcttgatgccat

SEQ ID NO: 466 - RNA, 23 nt, Homo sapiens
  source 1..23: mol_type = genomic RNA
aagctaaagtcttgatgccatca

SEQ ID NO: 467 - RNA, 23 nt, Homo sapiens
  source 1..23: mol_type = genomic RNA
ttgatgccatcaaaggacatccc

SEQ ID NO: 468 - RNA, 23 nt, Homo sapiens
  source 1..23: mol_type = genomic RNA
tgatgccatcaaaggacatccct

SEQ ID NO: 469 - RNA, 23 nt, Homo sapiens
  source 1..23: mol_type = genomic RNA
atgccatcaaaggacatccctgc

SEQ ID NO: 470 - RNA, 23 nt, Homo sapiens
  source 1..23: mol_type = genomic RNA
cacatctctgtcacgtccactaa

SEQ ID NO: 471 - RNA, 23 nt, Homo sapiens
  source 1..23: mol_type = genomic RNA
acatctctgtcacgtccactaat

SEQ ID NO: 472 - RNA, 23 nt, Homo sapiens
  source 1..23: mol_type = genomic RNA
catctctgtcacgtccactaatc

SEQ ID NO: 473 - RNA, 23 nt, Homo sapiens
  source 1..23: mol_type = genomic RNA
atctctgtcacgtccactaatcg

SEQ ID NO: 474 - RNA, 23 nt, Homo sapiens
  source 1..23: mol_type = genomic RNA
tctctgtcacgtccactaatcgg

SEQ ID NO: 475 - RNA, 23 nt, Homo sapiens
  source 1..23: mol_type = genomic RNA
ctctgtcacgtccactaatcggc

SEQ ID NO: 476 - RNA, 23 nt, Homo sapiens
  source 1..23: mol_type = genomic RNA
tctgtcacgtccactaatcggca

SEQ ID NO: 477 - RNA, 23 nt, Homo sapiens
  source 1..23: mol_type = genomic RNA
ctgtcacgtccactaatcggcaa

SEQ ID NO: 478 - RNA, 23 nt, Homo sapiens
  source 1..23: mol_type = genomic RNA
tgtcacgtccactaatcggcaaa

SEQ ID NO: 479 - RNA, 23 nt, Homo sapiens
  source 1..23: mol_type = genomic RNA
gtcacgtccactaatcggcaaaa

SEQ ID NO: 480 - RNA, 23 nt, Homo sapiens
  source 1..23: mol_type = genomic RNA
cacgtccactaatcggcaaaagg

SEQ ID NO: 481 - RNA, 23 nt, Homo sapiens
  source 1..23: mol_type = genomic RNA
acgtccactaatcggcaaaagga

SEQ ID NO: 482 - RNA, 23 nt, Homo sapiens
  source 1..23: mol_type = genomic RNA
cgtccactaatcggcaaaaggag

SEQ ID NO: 483 - RNA, 23 nt, Homo sapiens
  source 1..23: mol_type = genomic RNA
gtccactaatcggcaaaaggaga

SEQ ID NO: 484 - RNA, 23 nt, Homo sapiens
  source 1..23: mol_type = genomic RNA
tccactaatcggcaaaaggagaa

SEQ ID NO: 485 - RNA, 23 nt, Homo sapiens
  source 1..23: mol_type = genomic RNA
ccactaatcggcaaaaggagaaa

SEQ ID NO: 486 - RNA, 23 nt, Homo sapiens
  source 1..23: mol_type = genomic RNA
gagagaagatgacctaagtgtga

SEQ ID NO: 487 - RNA, 23 nt, Homo sapiens
  source 1..23: mol_type = genomic RNA
cctcctccgaccaaggaggaagg

SEQ ID NO: 488 - RNA, 23 nt, Homo sapiens
  source 1..23: mol_type = genomic RNA
ttccagggaaggaactctccggt

SEQ ID NO: 489 - RNA, 23 nt, Homo sapiens
  source 1..23: mol_type = genomic RNA
tccagggaaggaactctccggtc

SEQ ID NO: 490 - RNA, 23 nt, Homo sapiens
  source 1..23: mol_type = genomic RNA
gaaggaactctccggtccaccat

SEQ ID NO: 491 - RNA, 23 nt, Homo sapiens
  source 1..23: mol_type = genomic RNA
aaggaactctccggtccaccatg

SEQ ID NO: 492 - RNA, 23 nt, Homo sapiens
  source 1..23: mol_type = genomic RNA
gaactctccggtccaccatggag

SEQ ID NO: 493 - RNA, 23 nt, Homo sapiens
  source 1..23: mol_type = genomic RNA
ctctccggtccaccatggagtac

SEQ ID NO: 494 - RNA, 23 nt, Homo sapiens
  source 1..23: mol_type = genomic RNA
tctgaaccccagtgacttactca

SEQ ID NO: 495 - RNA, 23 nt, Homo sapiens
  source 1..23: mol_type = genomic RNA
cagtgacttactcaggtcagtat

SEQ ID NO: 496 - RNA, 23 nt, Homo sapiens
  source 1..23: mol_type = genomic RNA
gtgacttactcaggtcagtatct

SEQ ID NO: 497 - RNA, 23 nt, Homo sapiens
  source 1..23: mol_type = genomic RNA
gacttactcaggtcagtatctaa

SEQ ID NO: 498 - RNA, 23 nt, Homo sapiens
  source 1..23: mol_type = genomic RNA
gtcagtatctaatataagctcgg

SEQ ID NO: 499 - RNA, 23 nt, Homo sapiens
  source 1..23: mol_type = genomic RNA
cagtatctaatataagctcggag

SEQ ID NO: 500 - RNA, 23 nt, Homo sapiens
  source 1..23: mol_type = genomic RNA
agtatctaatataagctcggagt

SEQ ID NO: 501 - RNA, 23 nt, Homo sapiens
  source 1..23: mol_type = genomic RNA
gtatctaatataagctcggagtt

SEQ ID NO: 502 - RNA, 23 nt, Homo sapiens
  source 1..23: mol_type = genomic RNA
tatctaatataagctcggagttt

SEQ ID NO: 503 - RNA, 23 nt, Homo sapiens
  source 1..23: mol_type = genomic RNA
atctaatataagctcggagtttg

SEQ ID NO: 504 - RNA, 23 nt, Homo sapiens
  source 1..23: mol_type = genomic RNA
tctaatataagctcggagtttgg

SEQ ID NO: 505 - RNA, 23 nt, Homo sapiens
  source 1..23: mol_type = genomic RNA
taatataagctcggagtttggac

SEQ ID NO: 506 - RNA, 23 nt, Homo sapiens
  source 1..23: mol_type = genomic RNA
aatataagctcggagtttggacg

SEQ ID NO: 507 - RNA, 23 nt, Homo sapiens
  source 1..23: mol_type = genomic RNA
atataagctcggagtttggacgg

SEQ ID NO: 508 - RNA, 23 nt, Homo sapiens
  source 1..23: mol_type = genomic RNA
aagctcggagtttggacggaggg

SEQ ID NO: 509 - RNA, 23 nt, Homo sapiens
  source 1..23: mol_type = genomic RNA
tcggagtttggacggagggtctg

SEQ ID NO: 510 - RNA, 23 nt, Homo sapiens
  source 1..23: mol_type = genomic RNA
accaccccagcgacctttccgtg

SEQ ID NO: 511 - RNA, 23 nt, Homo sapiens
  source 1..23: mol_type = genomic RNA
gtgtctgtgatcacaagcggacc

SEQ ID NO: 512 - RNA, 23 nt, Homo sapiens
  source 1..23: mol_type = genomic RNA
tgtctgtgatcacaagcggacca

SEQ ID NO: 513 - RNA, 23 nt, Homo sapiens
  source 1..23: mol_type = genomic RNA
gtctgtgatcacaagcggaccat

SEQ ID NO: 514 - RNA, 23 nt, Homo sapiens
  source 1..23: mol_type = genomic RNA
tctgtgatcacaagcggaccatc

SEQ ID NO: 515 - RNA, 23 nt, Homo sapiens
  source 1..23: mol_type = genomic RNA
ctgtgatcacaagcggaccatcc

SEQ ID NO: 516 - RNA, 23 nt, Homo sapiens
  source 1..23: mol_type = genomic RNA
ccaggagctgctagccaaagcat

SEQ ID NO: 517 - RNA, 23 nt, Homo sapiens
  source 1..23: mol_type = genomic RNA
ggagctgctagccaaagcattgg

SEQ ID NO: 518 - RNA, 23 nt, Homo sapiens
  source 1..23: mol_type = genomic RNA
agctgctagccaaagcattggag

SEQ ID NO: 519 - RNA, 23 nt, Homo sapiens
  source 1..23: mol_type = genomic RNA
gctgctagccaaagcattggaga

SEQ ID NO: 520 - RNA, 23 nt, Homo sapiens
  source 1..23: mol_type = genomic RNA
tgctagccaaagcattggagacc

SEQ ID NO: 521 - RNA, 23 nt, Homo sapiens
  source 1..23: mol_type = genomic RNA
gctagccaaagcattggagaccc

SEQ ID NO: 522 - RNA, 23 nt, Homo sapiens
  source 1..23: mol_type = genomic RNA
agggagctccttcgttggacctc

SEQ ID NO: 523 - RNA, 23 nt, Homo sapiens
  source 1..23: mol_type = genomic RNA
gggagctccttcgttggacctcc

SEQ ID NO: 524 - RNA, 23 nt, Homo sapiens
  source 1..23: mol_type = genomic RNA
ggagctccttcgttggacctcca

SEQ ID NO: 525 - RNA, 23 nt, Homo sapiens
  source 1..23: mol_type = genomic RNA
caaggcctgggccatatgttgct

SEQ ID NO: 526 - RNA, 23 nt, Homo sapiens
  source 1..23: mol_type = genomic RNA
aggcctgggccatatgttgctgg

SEQ ID NO: 527 - RNA, 23 nt, Homo sapiens
  source 1..23: mol_type = genomic RNA
gcctgggccatatgttgctggga

SEQ ID NO: 528 - RNA, 23 nt, Homo sapiens
  source 1..23: mol_type = genomic RNA
cctgggccatatgttgctgggaa

SEQ ID NO: 529 - RNA, 23 nt, Homo sapiens
  source 1..23: mol_type = genomic RNA
atatgttgctgggaatttcctcc

SEQ ID NO: 530 - RNA, 23 nt, Homo sapiens
  source 1..23: mol_type = genomic RNA
tgctgggaatttcctccaccctt

SEQ ID NO: 531 - RNA, 23 nt, Homo sapiens
  source 1..23: mol_type = genomic RNA
atttcctccacccttcgtcatgc

SEQ ID NO: 532 - RNA, 23 nt, Homo sapiens
  source 1..23: mol_type = genomic RNA
agaagggccgcctccattcctac

SEQ ID NO: 533 - RNA, 23 nt, Homo sapiens
  source 1..23: mol_type = genomic RNA
agggccgcctccattcctactaa

SEQ ID NO: 534 - RNA, 23 nt, Homo sapiens
  source 1..23: mol_type = genomic RNA
ccactgcaaagactatgacagca

SEQ ID NO: 535 - RNA, 23 nt, Homo sapiens
  source 1..23: mol_type = genomic RNA
gacagcatcaaatttcaggacct

SEQ ID NO: 536 - RNA, 23 nt, Homo sapiens
  source 1..23: mol_type = genomic RNA
tttcaggacctgcagacagtaca

SEQ ID NO: 537 - RNA, 23 nt, Homo sapiens
  source 1..23: mol_type = genomic RNA
ctgcagacagtacaggctagata

SEQ ID NO: 538 - RNA, 23 nt, Homo sapiens
  source 1..23: mol_type = genomic RNA
tgcagacagtacaggctagataa

SEQ ID NO: 539 - RNA, 23 nt, Homo sapiens
  source 1..23: mol_type = genomic RNA
gcagacagtacaggctagataac

SEQ ID NO: 540 - RNA, 23 nt, Homo sapiens
  source 1..23: mol_type = genomic RNA
cctcccacttgccctgaaaggcc

SEQ ID NO: 541 - RNA, 23 nt, Homo sapiens
  source 1..23: mol_type = genomic RNA
gactgctgctacatctaatcccc

SEQ ID NO: 542 - RNA, 23 nt, Homo sapiens
  source 1..23: mol_type = genomic RNA
actgctgctacatctaatcccct

SEQ ID NO: 543 - RNA, 23 nt, Homo sapiens
  source 1..23: mol_type = genomic RNA
ctgctgctacatctaatccccta

SEQ ID NO: 544 - RNA, 23 nt, Homo sapiens
  source 1..23: mol_type = genomic RNA
ctacatctaatcccctaccaatg

SEQ ID NO: 545 - RNA, 23 nt, Homo sapiens
  source 1..23: mol_type = genomic RNA
acatctaatcccctaccaatgcc

SEQ ID NO: 546 - RNA, 23 nt, Homo sapiens
  source 1..23: mol_type = genomic RNA
atcccctaccaatgcctcctgtc

SEQ ID NO: 547 - RNA, 23 nt, Homo sapiens
  source 1..23: mol_type = genomic RNA
tcccctaccaatgcctcctgtcc

SEQ ID NO: 548 - RNA, 23 nt, Homo sapiens
  source 1..23: mol_type = genomic RNA
ctaccaatgcctcctgtccctaa

SEQ ID NO: 549 - RNA, 23 nt, Homo sapiens
  source 1..23: mol_type = genomic RNA
taccaatgcctcctgtccctaaa

SEQ ID NO: 550 - RNA, 23 nt, Homo sapiens
  source 1..23: mol_type = genomic RNA
caatgcctcctgtccctaaactc

SEQ ID NO: 551 - RNA, 23 nt, Homo sapiens
  source 1..23: mol_type = genomic RNA
aatgcctcctgtccctaaactcc

SEQ ID NO: 552 - RNA, 23 nt, Homo sapiens
  source 1..23: mol_type = genomic RNA
catactgatgacagccctctctg

SEQ ID NO: 553 - RNA, 21 nt, synthetic construct
  source 1..21: mol_type = other RNA
agctcagcagtgtctcgttca

SEQ ID NO: 554 - RNA, 21 nt, synthetic construct
  source 1..21: mol_type = other RNA
gctcagcagtgtctcgttcca

SEQ ID NO: 555 - RNA, 21 nt, synthetic construct
  source 1..21: mol_type = other RNA
ggacggtagcagaccgacata

SEQ ID NO: 556 - RNA, 21 nt, synthetic construct
  source 1..21: mol_type = other RNA
acggtagcagaccgacatcca

SEQ ID NO: 557 - RNA, 21 nt, synthetic construct
  source 1..21: mol_type = other RNA
cggtagcagaccgacatccta

SEQ ID NO: 558 - RNA, 21 nt, synthetic construct
  source 1..21: mol_type = other RNA
agcagaccgacatccttctga

SEQ ID NO: 559 - RNA, 21 nt, synthetic construct
  source 1..21: mol_type = other RNA
gcagaccgacatccttctgga

SEQ ID NO: 560 - RNA, 21 nt, synthetic construct
  source 1..21: mol_type = other RNA
tccatgcaactgtccatcaca

SEQ ID NO: 561 - RNA, 21 nt, synthetic construct
  source 1..21: mol_type = other RNA
ccatgcaactgtccatcacga

SEQ ID NO: 562 - RNA, 21 nt, synthetic construct
  source 1..21: mol_type = other RNA
catgcaactgtccatcacgga

SEQ ID NO: 563 - RNA, 21 nt, synthetic construct
  source 1..21: mol_type = other RNA
aactgtccatcacggctgcaa

SEQ ID NO: 564 - RNA, 21 nt, synthetic construct
  source 1..21: mol_type = other RNA
actgtccatcacggctgcaaa

SEQ ID NO: 565 - RNA, 21 nt, synthetic construct
  source 1..21: mol_type = other RNA
gtccatcacggctgcaactga

SEQ ID NO: 566 - RNA, 21 nt, synthetic construct
  source 1..21: mol_type = other RNA
atcacggctgcaactgaaata

SEQ ID NO: 567 - RNA, 21 nt, synthetic construct
  source 1..21: mol_type = other RNA
tgggacacagcgcaccagaaa

SEQ ID NO: 568 - RNA, 21 nt, synthetic construct
  source 1..21: mol_type = other RNA
gacacagcgcaccagaagcta

SEQ ID NO: 569 - RNA, 21 nt, synthetic construct
  source 1..21: mol_type = other RNA
acagcgcaccagaagctaaaa

SEQ ID NO: 570 - RNA, 19 nt, synthetic construct
  source 1..19: mol_type = other RNA
gccacattctacgggctca

SEQ ID NO: 571 - RNA, 19 nt, synthetic construct
  source 1..19: mol_type = other RNA
gaaagtactcagggagcta

SEQ ID NO: 572 - RNA, 19 nt, synthetic construct
  source 1..19: mol_type = other RNA
gtctatacccttacctgaa

SEQ ID NO: 573 - RNA, 19 nt, synthetic construct
  source 1..19: mol_type = other RNA
gctgctagccaaagcatta

SEQ ID NO: 574 - RNA, 19 nt, synthetic construct
  source 1..19: mol_type = other RNA
ggagtggagtgctgtcata

SEQ ID NO: 575 - RNA, 19 nt, synthetic construct
  source 1..19: mol_type = other RNA
ggccaagatcaagatgtca

SEQ ID NO: 576 - RNA, 19 nt, synthetic construct
  source 1..19: mol_type = other RNA
cttgagatctgtcttcata

SEQ ID NO: 577 - RNA, 19 nt, synthetic construct
  source 1..19: mol_type = other RNA
cctcaaactaacaaaaaca

SEQ ID NO: 578 - RNA, 19 nt, synthetic construct
  source 1..19: mol_type = other RNA
ctcaaactaacaaaaacaa

SEQ ID NO: 579 - RNA, 19 nt, synthetic construct
  source 1..19: mol_type = other RNA
caaactaacaaaaacatta

SEQ ID NO: 580 - RNA, 19 nt, synthetic construct
  source 1..19: mol_type = other RNA
ctaacaaaaacatttccaa

SEQ ID NO: 581 - RNA, 19 nt, synthetic construct
  source 1..19: mol_type = other RNA
caaaaacatttccaataaa

SEQ ID NO: 582 - RNA, 19 nt, synthetic construct
  source 1..19: mol_type = other RNA
ccaataaaaatatcaaata

SEQ ID NO: 583 - RNA, 19 nt, synthetic construct
  source 1..19: mol_type = other RNA
caataaaaatatcaaataa

SEQ ID NO: 584 - RNA, 19 nt, synthetic construct
  source 1..19: mol_type = other RNA
ccaaagcattggagaccca

SEQ ID NO: 585 - RNA, 19 nt, synthetic construct
  source 1..19: mol_type = other RNA
caggtcagtatctaatata

SEQ ID NO: 586 - RNA, 19 nt, synthetic construct
  source 1..19: mol_type = other RNA
atgtcaaagccacattcta

SEQ ID NO: 587 - RNA, 19 nt, synthetic construct
  source 1..19: mol_type = other RNA
gctctactctatgagttga

SEQ ID NO: 588 - RNA, 19 nt, synthetic construct
  source 1..19: mol_type = other RNA
ctatgagttgtgactttca

SEQ ID NO: 589 - RNA, 19 nt, synthetic construct
  source 1..19: mol_type = other RNA
tatgagttgtgactttcaa

SEQ ID NO: 590 - RNA, 19 nt, synthetic construct
  source 1..19: mol_type = other RNA
ggcccaaagaaagtactca

SEQ ID NO: 591 - RNA, 19 nt, synthetic construct
  source 1..19: mol_type = other RNA
gccatatgttgctgggaaa

SEQ ID NO: 592 - RNA, 19 nt, synthetic construct
  source 1..19: mol_type = other RNA
cccactgcaaagactatga

SEQ ID NO: 593 - RNA, 19 nt, synthetic construct
  source 1..19: mol_type = other RNA
gactatgacagcatcaaaa

SEQ ID NO: 594 - RNA, 19 nt, synthetic construct
  source 1..19: mol_type = other RNA
ctatgacagcatcaaatta

SEQ ID NO: 595 - RNA, 19 nt, synthetic construct
  source 1..19: mol_type = other RNA
ctgaagaatgctgttctta

SEQ ID NO: 596 - RNA, 19 nt, synthetic construct
  source 1..19: mol_type = other RNA
cctgaaaggccaagatcaa

SEQ ID NO: 597 - RNA, 19 nt, synthetic construct
  source 1..19: mol_type = other RNA
gactgctgctacatctaaa

SEQ ID NO: 598 - RNA, 19 nt, synthetic construct
  source 1..19: mol_type = other RNA
aggtcagtatctaatataa

SEQ ID NO: 599 - RNA, 19 nt, synthetic construct
  source 1..19: mol_type = other RNA
ggaatttcctccaccctta

SEQ ID NO: 600 - RNA, 19 nt, synthetic construct
  source 1..19: mol_type = other RNA
gattcacctttgacgtgta

SEQ ID NO: 601 - RNA, 19 nt, synthetic construct
  source 1..19: mol_type = other RNA
gaggatgacacgtgcctga

SEQ ID NO: 602 - RNA, 23 nt, synthetic construct
  source 1..23: mol_type = other RNA
tgaacgagacactgctgagctgg

SEQ ID NO: 603 - RNA, 23 nt, synthetic construct
  source 1..23: mol_type = other RNA
tggaacgagacactgctgagctg

SEQ ID NO: 604 - RNA, 23 nt, synthetic construct
  source 1..23: mol_type = other RNA
tatgtcggtctgctaccgtcccc

SEQ ID NO: 605 - RNA, 23 nt, synthetic construct
  source 1..23: mol_type = other RNA
tggatgtcggtctgctaccgtcc

SEQ ID NO: 606 - RNA, 23 nt, synthetic construct
  source 1..23: mol_type = other RNA
taggatgtcggtctgctaccgtc

SEQ ID NO: 607 - RNA, 23 nt, synthetic construct
  source 1..23: mol_type = other RNA
tcagaaggatgtcggtctgctac

SEQ ID NO: 608 - RNA, 23 nt, synthetic construct
  source 1..23: mol_type = other RNA
tccagaaggatgtcggtctgcta

SEQ ID NO: 609 - RNA, 23 nt, synthetic construct
  source 1..23: mol_type = other RNA
tgtgatggacagttgcatggaag

SEQ ID NO: 610 - RNA, 23 nt, synthetic construct
  source 1..23: mol_type = other RNA
tcgtgatggacagttgcatggaa

SEQ ID NO: 611 - RNA, 23 nt, synthetic construct
  source 1..23: mol_type = other RNA
tccgtgatggacagttgcatgga

SEQ ID NO: 612 - RNA, 23 nt, synthetic construct
  source 1..23: mol_type = other RNA
ttgcagccgtgatggacagttgc

SEQ ID NO: 613 - RNA, 23 nt, synthetic construct
  source 1..23: mol_type = other RNA
tttgcagccgtgatggacagttg

SEQ ID NO: 614 - RNA, 23 nt, synthetic construct
  source 1..23: mol_type = other RNA
tcagttgcagccgtgatggacag

SEQ ID NO: 615 - RNA, 23 nt, synthetic construct
  source 1..23: mol_type = other RNA
tatttcagttgcagccgtgatgg

SEQ ID NO: 616 - RNA, 23 nt, synthetic construct
  source 1..23: mol_type = other RNA
tttctggtgcgctgtgtcccagc

SEQ ID NO: 617 - RNA, 23 nt, synthetic construct
  source 1..23: mol_type = other RNA
tagcttctggtgcgctgtgtccc

SEQ ID NO: 618 - RNA, 23 nt, synthetic construct
  source 1..23: mol_type = other RNA
ttttagcttctggtgcgctgtgt

SEQ ID NO: 619 - RNA, 21 nt, synthetic construct
  source 1..21: mol_type = other RNA
tgagcccgtagaatgtggctt

SEQ ID NO: 620 - RNA, 21 nt, synthetic construct
  source 1..21: mol_type = other RNA
tagctccctgagtactttctt

SEQ ID NO: 621 - RNA, 21 nt, synthetic construct
  source 1..21: mol_type = other RNA
ttcaggtaagggtatagactt

SEQ ID NO: 622 - RNA, 21 nt, synthetic construct
  source 1..21: mol_type = other RNA
taatgctttggctagcagctc

SEQ ID NO: 623 - RNA, 21 nt, synthetic construct
  source 1..21: mol_type = other RNA
tatgacagcactccactcctt

SEQ ID NO: 624 - RNA, 21 nt, synthetic construct
  source 1..21: mol_type = other RNA
tgacatcttgatcttggcctt

SEQ ID NO: 625 - RNA, 21 nt, synthetic construct
  source 1..21: mol_type = other RNA
tatgaagacagatctcaagtt

SEQ ID NO: 626 - RNA, 21 nt, synthetic construct
  source 1..21: mol_type = other RNA
tatgaagacagatctcaaggt

SEQ ID NO: 627 - RNA, 21 nt, synthetic construct
  source 1..21: mol_type = other RNA
tgtttttgttagtttgagggg

SEQ ID NO: 628 - RNA, 21 nt, synthetic construct
  source 1..21: mol_type = other RNA
ttgtttttgttagtttgaggg

SEQ ID NO: 629 - RNA, 21 nt, synthetic construct
  source 1..21: mol_type = other RNA
taatgtttttgttagtttgag

SEQ ID NO: 630 - RNA, 21 nt, synthetic construct
  source 1..21: mol_type = other RNA
ttggaaatgtttttgttagtt

SEQ ID NO: 631 - RNA, 21 nt, synthetic construct
  source 1..21: mol_type = other RNA
tttattggaaatgtttttgtt

SEQ ID NO: 632 - RNA, 21 nt, synthetic construct
  source 1..21: mol_type = other RNA
tatttgatatttttattggaa

SEQ ID NO: 633 - RNA, 21 nt, synthetic construct
  source 1..21: mol_type = other RNA
ttatttgatatttttattgga

SEQ ID NO: 634 - RNA, 21 nt, synthetic construct
  source 1..21: mol_type = other RNA
tgggtctccaatgctttggtt

SEQ ID NO: 635 - RNA, 21 nt, synthetic construct
  source 1..21: mol_type = other RNA
tatattagatactgacctgtt

SEQ ID NO: 636 - RNA, 21 nt, synthetic construct
  source 1..21: mol_type = other RNA
tagaatgtggctttgacattc

SEQ ID NO: 637 - RNA, 21 nt, synthetic construct
  source 1..21: mol_type = other RNA
tcaactcatagagtagagctt

SEQ ID NO: 638 - RNA, 21 nt, synthetic construct
  source 1..21: mol_type = other RNA
tgaaagtcacaactcatagag

SEQ ID NO: 639 - RNA, 21 nt, synthetic construct
  source 1..21: mol_type = other RNA
ttgaaagtcacaactcataga

SEQ ID NO: 640 - RNA, 21 nt, synthetic construct
  source 1..21: mol_type = other RNA
tgagtactttctttgggcctt

SEQ ID NO: 641 - RNA, 21 nt, synthetic construct
  source 1..21: mol_type = other RNA
tttcccagcaacatatggctt

SEQ ID NO: 642 - RNA, 21 nt, synthetic construct
  source 1..21: mol_type = other RNA
tcatagtctttgcagtgggtt

SEQ ID NO: 643 - RNA, 21 nt, synthetic construct
  source 1..21: mol_type = other RNA
ttttgatgctgtcatagtctt

SEQ ID NO: 644 - RNA, 21 nt, synthetic construct
  source 1..21: mol_type = other RNA
taatttgatgctgtcatagtc

SEQ ID NO: 645 - RNA, 21 nt, synthetic construct
  source 1..21: mol_type = other RNA
taagaacagcattcttcagtt

SEQ ID NO: 646 - RNA, 21 nt, synthetic construct
  source 1..21: mol_type = other RNA
taagaacagcattcttcaggt

SEQ ID NO: 647 - RNA, 21 nt, synthetic construct
  source 1..21: mol_type = other RNA
ttgatcttggcctttcaggtt

SEQ ID NO: 648 - RNA, 21 nt, synthetic construct
  source 1..21: mol_type = other RNA
ttgatcttggcctttcagggc

SEQ ID NO: 649 - RNA, 21 nt, synthetic construct
  source 1..21: mol_type = other RNA
tttagatgtagcagcagtctt

SEQ ID NO: 650 - RNA, 21 nt, synthetic construct
  source 1..21: mol_type = other RNA
ttatattagatactgaccttt

SEQ ID NO: 651 - RNA, 21 nt, synthetic construct
  source 1..21: mol_type = other RNA
taagggtggaggaaattcctt

SEQ ID NO: 652 - RNA, 21 nt, synthetic construct
  source 1..21: mol_type = other RNA
tacacgtcaaaggtgaatctt

SEQ ID NO: 653 - RNA, 21 nt, synthetic construct
  source 1..21: mol_type = other RNA
tcaggcacgtgtcatcctctt

SEQ ID NO: 654 - RNA, 21 nt, synthetic construct
  source 1..21: mol_type = other RNA
taagtcacaactcatagagta

SEQ ID NO: 655 - RNA, 21 nt, synthetic construct
  source 1..21: mol_type = other RNA
tgcagttccatcctcctctag

SEQ ID NO: 656 - RNA, 21 nt, synthetic construct
  source 1..21: mol_type = other RNA
tacacgtcaaaggtgaatcgg

SEQ ID NO: 657 - RNA, 21 nt, synthetic construct
  source 1..21: mol_type = other RNA
ttattagatactgacctgatt

SEQ ID NO: 658 - RNA, 21 nt, synthetic construct
  source 1..21: mol_type = other RNA
  modified_base 1: mod_base = OTHER; note = 2'-O-methyladenosine with phosphorothioate linkage
  modified_base 2: mod_base = OTHER; note = 2'-O-methylguanosine with phosphorothioate linkage
  modified_base 3: mod_base = OTHER; note = 2'-O-methyladenosine
  modified_base 4: mod_base = OTHER; note = 2'-O-methylguanosine
  modified_base 5: mod_base = OTHER; note = 2'-O-methylcytidine
  modified_base 6: mod_base = OTHER; note = 2'-O-methyladenosine
  modified_base 7: mod_base = OTHER; note = 2'-fluoroadenosine
  modified_base 8: mod_base = OTHER; note = 2'-O-methylguanosine
  modified_base 9: mod_base = OTHER; note = 2'-fluorocytidine
  modified_base 10: mod_base = OTHER; note = 2'-fluorocytidine
  modified_base 11: mod_base = OTHER; note = 2'-fluoroguanosine
  modified_base 12: mod_base = OTHER; note = 2'-O-methyladenosine
  modified_base 13: mod_base = OTHER; note = 2'-O-methyladenosine
  modified_base 14: mod_base = OTHER; note = 2'-O-methylguanosine
  modified_base 15: mod_base = OTHER; note = 2'-O-methylguanosine
  modified_base 16: mod_base = OTHER; note = 2'-O-methylcytidine
  modified_base 17: mod_base = OTHER; note = 2'-O-methyladenosine
  modified_base 18: mod_base = OTHER; note = 2'-O-methyladenosine
  modified_base 19: mod_base = OTHER; note = 2'-O-methylguanosine
  modified_base 20: mod_base = OTHER; note = 2'-O-methylcytidine
  modified_base 21: mod_base = OTHER; note = 2'-O-methyladenosine
agagcaagccgaaggcaagca

SEQ ID NO: 659 - RNA, 21 nt, synthetic construct
  source 1..21: mol_type = other RNA
  modified_base 1: mod_base = OTHER; note = 2'-O-methyladenosine with phosphorothioate linkage
  modified_base 2: mod_base = OTHER; note = 2'-O-methyladenosine with phosphorothioate linkage
  modified_base 3: mod_base = OTHER; note = 2'-O-methylguanosine
  modified_base 4: mod_base = OTHER; note = 2'-O-methylcytidine
  modified_base 5: mod_base = OTHER; note = 2'-O-methylcytidine
  modified_base 6: mod_base = OTHER; note = 2'-O-methylguanosine
  modified_base 7: mod_base = OTHER; note = 2'-fluoroadenosine
  modified_base 8: mod_base = OTHER; note = 2'-O-methyladenosine
  modified_base 9: mod_base = OTHER; note = 2'-fluoroguanosine
  modified_base 10: mod_base = OTHER; note = 2'-fluoroguanosine
  modified_base 11: mod_base = OTHER; note = 2'-fluorocytidine
  modified_base 12: mod_base = OTHER; note = 2'-O-methyladenosine
  modified_base 13: mod_base = OTHER; note = 2'-O-methyladenosine
  modified_base 14: mod_base = OTHER; note = 2'-O-methylguanosine
  modified_base 15: mod_base = OTHER; note = 2'-O-methylcytidine
  modified_base 16: mod_base = OTHER; note = 2'-O-methyladenosine
  modified_base 17: mod_base = OTHER; note = 2'-O-methylcytidine
  modified_base 18: mod_base = OTHER; note = 2'-O-methylguanosine
  modified_base 19: mod_base = OTHER; note = 2'-O-methyladenosine
  modified_base 20: mod_base = OTHER; note = 2'-O-methyluridine
  modified_base 21: mod_base = OTHER; note = 2'-O-methyladenosine
aagccgaaggcaagcacgata

SEQ ID NO: 660 - RNA, 21 nt, synthetic construct
  source 1..21: mol_type = other RNA
  modified_base 1: mod_base = OTHER; note = 2'-O-methyladenosine with phosphorothioate linkage
  modified_base 2: mod_base = OTHER; note = 2'-O-methylguanosine with phosphorothioate linkage
  modified_base 3: mod_base = OTHER; note = 2'-O-methylcytidine
  modified_base 4: mod_base = OTHER; note = 2'-O-methylcytidine
  modified_base 5: mod_base = OTHER; note = 2'-O-methylguanosine
  modified_base 6: mod_base = OTHER; note = 2'-O-methyladenosine
  modified_base 7: mod_base = OTHER; note = 2'-fluoroadenosine
  modified_base 8: mod_base = OTHER; note = 2'-O-methylguanosine
  modified_base 9: mod_base = OTHER; note = 2'-fluoroguanosine
  modified_base 10: mod_base = OTHER; note = 2'-fluorocytidine
  modified_base 11: mod_base = OTHER; note = 2'-fluoroadenosine
  modified_base 12: mod_base = OTHER; note = 2'-O-methyladenosine
  modified_base 13: mod_base = OTHER; note = 2'-O-methylguanosine
  modified_base 14: mod_base = OTHER; note = 2'-O-methylcytidine
  modified_base 15: mod_base = OTHER; note = 2'-O-methyladenosine
  modified_base 16: mod_base = OTHER; note = 2'-O-methylcytidine
  modified_base 17: mod_base = OTHER; note = 2'-O-methylguanosine
  modified_base 18: mod_base = OTHER; note = 2'-O-methyladenosine
  modified_base 19: mod_base = OTHER; note = 2'-O-methyluridine
  modified_base 20: mod_base = OTHER; note = 2'-O-methylguanosine
  modified_base 21: mod_base = OTHER; note = 2'-O-methyladenosine
agccgaaggcaagcacgatga

SEQ ID NO: 661 - RNA, 21 nt, synthetic construct
  source 1..21: mol_type = other RNA
  modified_base 1: mod_base = OTHER; note = 2'-O-methylcytidine with phosphorothioate linkage
  modified_base 2: mod_base = OTHER; note = 2'-O-methylcytidine with phosphorothioate linkage
  modified_base 3: mod_base = OTHER; note = 2'-O-methylguanosine
  modified_base 4: mod_base = OTHER; note = 2'-O-methyladenosine
  modified_base 5: mod_base = OTHER; note = 2'-O-methyladenosine
  modified_base 6: mod_base = OTHER; note = 2'-O-methylguanosine
  modified_base 7: mod_base = OTHER; note = 2'-fluoroguanosine
  modified_base 8: mod_base = OTHER; note = 2'-O-methylcytidine
  modified_base 9: mod_base = OTHER; note = 2'-fluoroadenosine
  modified_base 10: mod_base = OTHER; note = 2'-fluoroadenosine
  modified_base 11: mod_base = OTHER; note = 2'-fluoroguanosine
  modified_base 12: mod_base = OTHER; note = 2'-O-methylcytidine
  modified_base 13: mod_base = OTHER; note = 2'-O-methyladenosine
  modified_base 14: mod_base = OTHER; note = 2'-O-methylcytidine
  modified_base 15: mod_base = OTHER; note = 2'-O-methylguanosine
  modified_base 16: mod_base = OTHER; note = 2'-O-methyladenosine
  modified_base 17: mod_base = OTHER; note = 2'-O-methyluridine
  modified_base 18: mod_base = OTHER; note = 2'-O-methylguanosine
  modified_base 19: mod_base = OTHER; note = 2'-O-methylguanosine
  modified_base 20: mod_base = OTHER; note = 2'-O-methylcytidine
  modified_base 21: mod_base = OTHER; note = 2'-O-methyladenosine
ccgaaggcaagcacgatggca

SEQ ID NO: 662 - RNA, 21 nt, synthetic construct
  source 1..21: mol_type = other RNA
  modified_base 1: mod_base = OTHER; note = 2'-O-methylcytidine with phosphorothioate linkage
  modified_base 2: mod_base = OTHER; note = 2'-O-methylguanosine with phosphorothioate linkage
  modified_base 3: mod_base = OTHER; note = 2'-O-methyladenosine
  modified_base 4: mod_base = OTHER; note = 2'-O-methyladenosine
  modified_base 5: mod_base = OTHER; note = 2'-O-methylguanosine
  modified_base 6: mod_base = OTHER; note = 2'-O-methylguanosine
  modified_base 7: mod_base = OTHER; note = 2'-fluorocytidine
  modified_base 8: mod_base = OTHER; note = 2'-O-methyladenosine
  modified_base 9: mod_base = OTHER; note = 2'-fluoroadenosine
  modified_base 10: mod_base = OTHER; note = 2'-fluoroguanosine
  modified_base 11: mod_base = OTHER; note = 2'-fluorocytidine
  modified_base 12: mod_base = OTHER; note = 2'-O-methyladenosine
  modified_base 13: mod_base = OTHER; note = 2'-O-methylcytidine
  modified_base 14: mod_base = OTHER; note = 2'-O-methylguanosine
  modified_base 15: mod_base = OTHER; note = 2'-O-methyladenosine
  modified_base 16: mod_base = OTHER; note = 2'-O-methyluridine
  modified_base 17: mod_base = OTHER; note = 2'-O-methylguanosine
  modified_base 18: mod_base = OTHER; note = 2'-O-methylguanosine
  modified_base 19: mod_base = OTHER; note = 2'-O-methylcytidine
  modified_base 20: mod_base = OTHER; note = 2'-O-methylguanosine
  modified_base 21: mod_base = OTHER; note = 2'-O-methyladenosine
cgaaggcaagcacgatggcga

SEQ ID NO: 663 - RNA, 21 nt, synthetic construct
  source 1..21: mol_type = other RNA
  modified_base 1: mod_base = OTHER; note = 2'-O-methylguanosine with phosphorothioate linkage
  modified_base 2: mod_base = OTHER; note = 2'-O-methylguanosine with phosphorothioate linkage
  modified_base 3: mod_base = OTHER; note = 2'-O-methylcytidine
  modified_base 4: mod_base = OTHER; note = 2'-O-methyladenosine
  modified_base 5: mod_base = OTHER; note = 2'-O-methyladenosine
  modified_base 6: mod_base = OTHER; note = 2'-O-methylguanosine
  modified_base 7: mod_base = OTHER; note = 2'-fluorocytidine
  modified_base 8: mod_base = OTHER; note = 2'-O-methyladenosine
  modified_base 9: mod_base = OTHER; note = 2'-fluorocytidine
  modified_base 10: mod_base = OTHER; note = 2'-fluoroguanosine
  modified_base 11: mod_base = OTHER; note = 2'-fluoroadenosine
  modified_base 12: mod_base = OTHER; note = 2'-O-methyluridine
  modified_base 13: mod_base = OTHER; note = 2'-O-methylguanosine
  modified_base 14: mod_base = OTHER; note = 2'-O-methylguanosine
  modified_base 15: mod_base = OTHER; note = 2'-O-methylcytidine
  modified_base 16: mod_base = OTHER; note = 2'-O-methylguanosine
  modified_base 17: mod_base = OTHER; note = 2'-O-methylcytidine
  modified_base 18: mod_base = OTHER; note = 2'-O-methyluridine
  modified_base 19: mod_base = OTHER; note = 2'-O-methylcytidine
  modified_base 20: mod_base = OTHER; note = 2'-O-methyladenosine
  modified_base 21: mod_base = OTHER; note = 2'-O-methyladenosine
ggcaagcacgatggcgctcaa

SEQ ID NO: 664 - RNA, 21 nt, synthetic construct
  source 1..21: mol_type = other RNA
  modified_base 1: mod_base = OTHER; note = 2'-O-methylguanosine with phosphorothioate linkage
  modified_base 2: mod_base = OTHER; note = 2'-O-methylcytidine with phosphorothioate linkage
  modified_base 3: mod_base = OTHER; note = 2'-O-methyladenosine
  modified_base 4: mod_base = OTHER; note = 2'-O-methyladenosine
  modified_base 5: mod_base = OTHER; note = 2'-O-methylguanosine
  modified_base 6: mod_base = OTHER; note = 2'-O-methylcytidine
  modified_base 7: mod_base = OTHER; note = 2'-fluoroadenosine
  modified_base 8: mod_base = OTHER; note = 2'-O-methylcytidine
  modified_base 9: mod_base = OTHER; note = 2'-fluoroguanosine
  modified_base 10: mod_base = OTHER; note = 2'-fluoroadenosine
  modified_base 11: mod_base = OTHER; note = 2'-fluorouridine
  modified_base 12: mod_base = OTHER; note = 2'-O-methylguanosine
  modified_base 13: mod_base = OTHER; note = 2'-O-methylguanosine
  modified_base 14: mod_base = OTHER; note = 2'-O-methylcytidine
  modified_base 15: mod_base = OTHER; note = 2'-O-methylguanosine
  modified_base 16: mod_base = OTHER; note = 2'-O-methylcytidine
  modified_base 17: mod_base = OTHER; note = 2'-O-methyluridine
  modified_base 18: mod_base = OTHER; note = 2'-O-methylcytidine
  modified_base 19: mod_base = OTHER; note = 2'-O-methyladenosine
  modified_base 20: mod_base = OTHER; note = 2'-O-methylcytidine
  modified_base 21: mod_base = OTHER; note = 2'-O-methyladenosine
gcaagcacgatggcgctcaca

SEQ ID NO: 665 - RNA, 21 nt, synthetic construct
  source 1..21: mol_type = other RNA
  modified_base 1: mod_base = OTHER; note = 2'-O-methylcytidine with phosphorothioate linkage
  modified_base 2: mod_base = OTHER; note = 2'-O-methyladenosine with phosphorothioate linkage
  modified_base 3: mod_base = OTHER; note = 2'-O-methyladenosine
  modified_base 4: mod_base = OTHER; note = 2'-O-methylguanosine
  modified_base 5: mod_base = OTHER; note = 2'-O-methylcytidine
  modified_base 6: mod_base = OTHER; note = 2'-O-methyladenosine
  modified_base 7: mod_base = OTHER; note = 2'-fluorocytidine
  modified_base 8: mod_base = OTHER; note = 2'-O-methylguanosine
  modified_base 9: mod_base = OTHER; note = 2'-fluoroadenosine
  modified_base 10: mod_base = OTHER; note = 2'-fluorouridine
  modified_base 11: mod_base = OTHER; note = 2'-fluoroguanosine
  modified_base 12: mod_base = OTHER; note = 2'-O-methylguanosine
  modified_base 13: mod_base = OTHER; note = 2'-O-methylcytidine
  modified_base 14: mod_base = OTHER; note = 2'-O-methylguanosine
  modified_base 15: mod_base = OTHER; note = 2'-O-methylcytidine
  modified_base 16: mod_base = OTHER; note = 2'-O-methyluridine
  modified_base 17: mod_base = OTHER; note = 2'-O-methylcytidine
  modified_base 18: mod_base = OTHER; note = 2'-O-methyladenosine
  modified_base 19: mod_base = OTHER; note = 2'-O-methylcytidine
  modified_base 20: mod_base = OTHER; note = 2'-O-methylcytidine
  modified_base 21: mod_base = OTHER; note = 2'-O-methyladenosine
caagcacgatggcgctcacca

SEQ ID NO: 666 - RNA, 21 nt, synthetic construct
  source 1..21: mol_type = other RNA
  modified_base 1: mod_base = OTHER; note = 2'-O-methyladenosine with phosphorothioate linkage
  modified_base 2: mod_base = OTHER; note = 2'-O-methyladenosine with phosphorothioate linkage
  modified_base 3: mod_base = OTHER; note = 2'-O-methylguanosine
  modified_base 4: mod_base = OTHER; note = 2'-O-methylcytidine
  modified_base 5: mod_base = OTHER; note = 2'-O-methyladenosine
  modified_base 6: mod_base = OTHER; note = 2'-O-methylcytidine
  modified_base 7: mod_base = OTHER; note = 2'-fluoroguanosine
  modified_base 8: mod_base = OTHER; note = 2'-O-methyladenosine
  modified_base 9: mod_base = OTHER; note = 2'-fluorouridine
  modified_base 10: mod_base = OTHER; note = 2'-fluoroguanosine
  modified_base 11: mod_base = OTHER; note = 2'-fluoroguanosine
  modified_base 12: mod_base = OTHER; note = 2'-O-methylcytidine
  modified_base 13: mod_base = OTHER; note = 2'-O-methylguanosine
  modified_base 14: mod_base = OTHER; note = 2'-O-methylcytidine
  modified_base 15: mod_base = OTHER; note = 2'-O-methyluridine
  modified_base 16: mod_base = OTHER; note = 2'-O-methylcytidine
  modified_base 17: mod_base = OTHER; note = 2'-O-methyladenosine
  modified_base 18: mod_base = OTHER; note = 2'-O-methylcytidine
  modified_base 19: mod_base = OTHER; note = 2'-O-methylcytidine
  modified_base 20: mod_base = OTHER; note = 2'-O-methyladenosine
  modified_base 21: mod_base = OTHER; note = 2'-O-methyladenosine
aagcacgatggcgctcaccaa

SEQ ID NO: 667 - RNA, 21 nt, synthetic construct
  source 1..21: mol_type = other RNA
  modified_base 1: mod_base = OTHER; note = 2'-O-methyladenosine with phosphorothioate linkage
  modified_base 2: mod_base = OTHER; note = 2'-O-methylcytidine with phosphorothioate linkage
  modified_base 3: mod_base = OTHER; note = 2'-O-methylguanosine
  modified_base 4: mod_base = OTHER; note = 2'-O-methyladenosine
  modified_base 5: mod_base = OTHER; note = 2'-O-methyluridine
  modified_base 6: mod_base = OTHER; note = 2'-O-methylguanosine
  modified_base 7: mod_base = OTHER; note = 2'-fluoroguanosine
  modified_base 8: mod_base = OTHER; note = 2'-O-methylcytidine
  modified_base 9: mod_base = OTHER; note = 2'-fluoroguanosine
  modified_base 10: mod_base = OTHER; note = 2'-fluorocytidine
  modified_base 11: mod_base = OTHER; note = 2'-fluorouridine
  modified_base 12: mod_base = OTHER; note = 2'-O-methylcytidine
  modified_base 13: mod_base = OTHER; note = 2'-O-methyladenosine
  modified_base 14: mod_base = OTHER; note = 2'-O-methylcytidine
  modified_base 15: mod_base = OTHER; note = 2'-O-methylcytidine
  modified_base 16: mod_base = OTHER; note = 2'-O-methyladenosine
  modified_base 17: mod_base = OTHER; note = 2'-O-methylguanosine
  modified_base 18: mod_base = OTHER; note = 2'-O-methylcytidine
  modified_base 19: mod_base = OTHER; note = 2'-O-methylcytidine
  modified_base 20: mod_base = OTHER; note = 2'-O-methylguanosine
  modified_base 21: mod_base = OTHER; note = 2'-O-methyladenosine
acgatggcgctcaccagccga

SEQ ID NO: 668 - RNA, 21 nt, synthetic construct
  source 1..21: mol_type = other RNA
  modified_base 1: mod_base = OTHER; note = 2'-O-methylcytidine with phosphorothioate linkage
  modified_base 2: mod_base = OTHER; note = 2'-O-methylcytidine with phosphorothioate linkage
  modified_base 3: mod_base = OTHER; note = 2'-O-methylcytidine
  modified_base 4: mod_base = OTHER; note = 2'-O-methylcytidine
  modified_base 5: mod_base = OTHER; note = 2'-O-methylguanosine
  modified_base 6: mod_base = OTHER; note = 2'-O-methylcytidine
  modified_base 7: mod_base = OTHER; note = 2'-fluoroadenosine
  modified_base 8: mod_base = OTHER; note = 2'-O-methylguanosine
  modified_base 9: mod_base = OTHER; note = 2'-fluorocytidine
  modified_base 10: mod_base = OTHER; note = 2'-fluorocytidine
  modified_base 11: mod_base = OTHER; note = 2'-fluoroguanosine
  modified_base 12: mod_base = OTHER; note = 2'-O-methyluridine
  modified_base 13: mod_base = OTHER; note = 2'-O-methylguanosine
  modified_base 14: mod_base = OTHER; note = 2'-O-methylcytidine
  modified_base 15: mod_base = OTHER; note = 2'-O-methylcytidine
  modified_base 16: mod_base = OTHER; note = 2'-O-methyladenosine
  modified_base 17: mod_base = OTHER; note = 2'-O-methylguanosine
  modified_base 18: mod_base = OTHER; note = 2'-O-methylcytidine
  modified_base 19: mod_base = OTHER; note = 2'-O-methylguanosine
  modified_base 20: mod_base = OTHER; note = 2'-O-methyluridine
  modified_base 21: mod_base = OTHER; note = 2'-O-methyladenosine
ccccgcagccgtgccagcgta

SEQ ID NO: 669 - RNA, 21 nt, synthetic construct
  source 1..21: mol_type = other RNA
  modified_base 1: mod_base = OTHER; note = 2'-O-methylguanosine with phosphorothioate linkage
  modified_base 2: mod_base = OTHER; note = 2'-O-methylcytidine with phosphorothioate linkage
  modified_base 3: mod_base = OTHER; note = 2'-O-methyladenosine
  modified_base 4: mod_base = OTHER; note = 2'-O-methylguanosine
  modified_base 5: mod_base = OTHER; note = 2'-O-methylcytidine
  modified_base 6: mod_base = OTHER; note = 2'-O-methylcytidine
  modified_base 7: mod_base = OTHER; note = 2'-fluoroguanosine
  modified_base 8: mod_base = OTHER; note = 2'-O-methyluridine
  modified_base 9: mod_base = OTHER; note = 2'-fluoroguanosine
  modified_base 10: mod_base = OTHER; note = 2'-fluorocytidine
  modified_base 11: mod_base = OTHER; note = 2'-fluorocytidine
  modified_base 12: mod_base = OTHER; note = 2'-O-methyladenosine
  modified_base 13: mod_base = OTHER; note = 2'-O-methylguanosine
  modified_base 14: mod_base = OTHER; note = 2'-O-methylcytidine
  modified_base 15: mod_base = OTHER; note = 2'-O-methylguanosine
  modified_base 16: mod_base = OTHER; note = 2'-O-methyluridine
  modified_base 17: mod_base = OTHER; note = 2'-O-methylcytidine
  modified_base 18: mod_base = OTHER; note = 2'-O-methyladenosine
  modified_base 19: mod_base = OTHER; note = 2'-O-methylcytidine
  modified_base 20: mod_base = OTHER; note = 2'-O-methylguanosine
  modified_base 21: mod_base = OTHER; note = 2'-O-methyladenosine
gcagccgtgccagcgtcacga

SEQ ID NO: 670 - RNA, 21 nt, synthetic construct
  source 1..21: mol_type = other RNA
  modified_base 1: mod_base = OTHER; note = 2'-O-methylcytidine with phosphorothioate linkage
  modified_base 2: mod_base = OTHER; note = 2'-O-methyladenosine with phosphorothioate linkage
  modified_base 3: mod_base = OTHER; note = 2'-O-methylguanosine
  modified_base 4: mod_base = OTHER; note = 2'-O-methylcytidine
  modified_base 5: mod_base = OTHER; note = 2'-O-methylcytidine
  modified_base 6: mod_base = OTHER; note = 2'-O-methylguanosine
  modified_base 7: mod_base = OTHER; note = 2'-fluorouridine
  modified_base 8: mod_base = OTHER; note = 2'-O-methylguanosine
  modified_base 9: mod_base = OTHER; note = 2'-fluorocytidine
  modified_base 10: mod_base = OTHER; note = 2'-fluorocytidine
  modified_base 11: mod_base = OTHER; note = 2'-fluoroadenosine
  modified_base 12: mod_base = OTHER; note = 2'-O-methylguanosine
  modified_base 13: mod_base = OTHER; note = 2'-O-methylcytidine
  modified_base 14: mod_base = OTHER; note = 2'-O-methylguanosine
  modified_base 15: mod_base = OTHER; note = 2'-O-methyluridine
  modified_base 16: mod_base = OTHER; note = 2'-O-methylcytidine
  modified_base 17: mod_base = OTHER; note = 2'-O-methyladenosine
  modified_base 18: mod_base = OTHER; note = 2'-O-methylcytidine
  modified_base 19: mod_base = OTHER; note = 2'-O-methylguanosine
  modified_base 20: mod_base = OTHER; note = 2'-O-methylcytidine
  modified_base 21: mod_base = OTHER; note = 2'-O-methyladenosine
cagccgtgccagcgtcacgca

SEQ ID NO: 671 - RNA, 21 nt, synthetic construct
  source 1..21: mol_type = other RNA
  modified_base 1: mod_base = OTHER; note = 2'-O-methyladenosine with phosphorothioate linkage
  modified_base 2: mod_base = OTHER; note = 2'-O-methylguanosine with phosphorothioate linkage
  modified_base 3: mod_base = OTHER; note = 2'-O-methylcytidine
  modified_base 4: mod_base = OTHER; note = 2'-O-methylcytidine
  modified_base 5: mod_base = OTHER; note = 2'-O-methylguanosine
  modified_base 6: mod_base = OTHER; note = 2'-O-methyluridine
  modified_base 7: mod_base = OTHER; note = 2'-fluoroguanosine
  modified_base 8: mod_base = OTHER; note = 2'-O-methylcytidine
  modified_base 9: mod_base = OTHER; note = 2'-fluorocytidine
  modified_base 10: mod_base = OTHER; note = 2'-fluoroadenosine
  modified_base 11: mod_base = OTHER; note = 2'-fluoroguanosine
  modified_base 12: mod_base = OTHER; note = 2'-O-methylcytidine
  modified_base 13: mod_base = OTHER; note = 2'-O-methylguanosine
  modified_base 14: mod_base = OTHER; note = 2'-O-methyluridine
  modified_base 15: mod_base = OTHER; note = 2'-O-methylcytidine
  modified_base 16: mod_base = OTHER; note = 2'-O-methyladenosine
  modified_base 17: mod_base = OTHER; note = 2'-O-methylcytidine
  modified_base 18: mod_base = OTHER; note = 2'-O-methylguanosine
  modified_base 19: mod_base = OTHER; note = 2'-O-methylcytidine
  modified_base 20: mod_base = OTHER; note = 2'-O-methyluridine
  modified_base 21: mod_base = OTHER; note = 2'-O-methyladenosine
agccgtgccagcgtcacgcta

SEQ ID NO: 672 - RNA, 21 nt, synthetic construct
  source 1..21: mol_type = other RNA
  modified_base 1: mod_base = OTHER; note = 2'-O-methylguanosine with phosphorothioate linkage
  modified_base 2: mod_base = OTHER; note = 2'-O-methylcytidine with phosphorothioate linkage
  modified_base 3: mod_base = OTHER; note = 2'-O-methylcytidine
  modified_base 4: mod_base = OTHER; note = 2'-O-methylguanosine
  modified_base 5: mod_base = OTHER; note = 2'-O-methyluridine
  modified_base 6: mod_base = OTHER; note = 2'-O-methylguanosine
  modified_base 7: mod_base = OTHER; note = 2'-fluorocytidine
  modified_base 8: mod_base = OTHER; note = 2'-O-methylcytidine
  modified_base 9: mod_base = OTHER; note = 2'-fluoroadenosine
  modified_base 10: mod_base = OTHER; note = 2'-fluoroguanosine
  modified_base 11: mod_base = OTHER; note = 2'-fluorocytidine
  modified_base 12: mod_base = OTHER; note = 2'-O-methylguanosine
  modified_base 13: mod_base = OTHER; note = 2'-O-methyluridine
  modified_base 14: mod_base = OTHER; note = 2'-O-methylcytidine
  modified_base 15: mod_base = OTHER; note = 2'-O-methyladenosine
  modified_base 16: mod_base = OTHER; note = 2'-O-methylcytidine
  modified_base 17: mod_base = OTHER; note = 2'-O-methylguanosine
  modified_base 18: mod_base = OTHER; note = 2'-O-methylcytidine
  modified_base 19: mod_base = OTHER; note = 2'-O-methyluridine
  modified_base 20: mod_base = OTHER; note = 2'-O-methylguanosine
  modified_base 21: mod_base = OTHER; note = 2'-O-methyladenosine
gccgtgccagcgtcacgctga

SEQ ID NO: 673 - RNA, 21 nt, synthetic construct
  source 1..21: mol_type = other RNA
  modified_base 1: mod_base = OTHER; note = 2'-O-methylcytidine with phosphorothioate linkage
  modified_base 2: mod_base = OTHER; note = 2'-O-methylguanosine with phosphorothioate linkage
  modified_base 3: mod_base = OTHER; note = 2'-O-methyluridine
  modified_base 4: mod_base = OTHER; note = 2'-O-methylguanosine
  modified_base 5: mod_base = OTHER; note = 2'-O-methylcytidine
  modified_base 6: mod_base = OTHER; note = 2'-O-methylcytidine
  modified_base 7: mod_base = OTHER; note = 2'-fluoroadenosine
  modified_base 8: mod_base = OTHER; note = 2'-O-methylguanosine
  modified_base 9: mod_base = OTHER; note = 2'-fluorocytidine
  modified_base 10: mod_base = OTHER; note = 2'-fluoroguanosine
  modified_base 11: mod_base = OTHER; note = 2'-fluorouridine
  modified_base 12: mod_base = OTHER; note = 2'-O-methylcytidine
  modified_base 13: mod_base = OTHER; note = 2'-O-methyladenosine
  modified_base 14: mod_base = OTHER; note = 2'-O-methylcytidine
  modified_base 15: mod_base = OTHER; note = 2'-O-methylguanosine
  modified_base 16: mod_base = OTHER; note = 2'-O-methylcytidine
  modified_base 17: mod_base = OTHER; note = 2'-O-methyluridine
  modified_base 18: mod_base = OTHER; note = 2'-O-methylguanosine
  modified_base 19: mod_base = OTHER; note = 2'-O-methyluridine
  modified_base 20: mod_base = OTHER; note = 2'-O-methyladenosine
  modified_base 21: mod_base = OTHER; note = 2'-O-methyladenosine
cgtgccagcgtcacgctgtaa

SEQ ID NO: 674 - RNA, 21 nt, synthetic construct
  source 1..21: mol_type = other RNA
  modified_base 1: mod_base = OTHER; note = 2'-O-methylguanosine with phosphorothioate linkage
  modified_base 2: mod_base = OTHER; note = 2'-O-methylcytidine with phosphorothioate linkage
  modified_base 3: mod_base = OTHER; note = 2'-O-methylcytidine
  modified_base 4: mod_base = OTHER; note = 2'-O-methyladenosine
  modified_base 5: mod_base = OTHER; note = 2'-O-methylguanosine
  modified_base 6: mod_base = OTHER; note = 2'-O-methylcytidine
  modified_base 7: mod_base = OTHER; note = 2'-fluoroguanosine
  modified_base 8: mod_base = OTHER; note = 2'-O-methyluridine
  modified_base 9: mod_base = OTHER; note = 2'-fluorocytidine
  modified_base 10: mod_base = OTHER; note = 2'-fluoroadenosine
  modified_base 11: mod_base = OTHER; note = 2'-fluorocytidine
  modified_base 12: mod_base = OTHER; note = 2'-O-methylguanosine
  modified_base 13: mod_base = OTHER; note = 2'-O-methylcytidine
  modified_base 14: mod_base = OTHER; note = 2'-O-methyluridine
  modified_base 15: mod_base = OTHER; note = 2'-O-methylguanosine
  modified_base 16: mod_base = OTHER; note = 2'-O-methyluridine
  modified_base 17: mod_base = OTHER; note = 2'-O-methyladenosine
  modified_base 18: mod_base = OTHER; note = 2'-O-methylguanosine
  modified_base 19: mod_base = OTHER; note = 2'-O-methylcytidine
  modified_base 20: mod_base = OTHER; note = 2'-O-methyladenosine
  modified_base 21: mod_base = OTHER; note = 2'-O-methyladenosine
gccagcgtcacgctgtagcaa

SEQ ID NO: 675 - RNA, 21 nt, synthetic construct
  source 1..21: mol_type = other RNA
  modified_base 1: mod_base = OTHER; note = 2'-O-methylcytidine with phosphorothioate linkage
  modified_base 2: mod_base = OTHER; note = 2'-O-methylcytidine with phosphorothioate linkage
  modified_base 3: mod_base = OTHER; note = 2'-O-methyladenosine
  modified_base 4: mod_base = OTHER; note = 2'-O-methylguanosine
  modified_base 5: mod_base = OTHER; note = 2'-O-methylcytidine
  modified_base 6: mod_base = OTHER; note = 2'-O-methylguanosine
  modified_base 7: mod_base = OTHER; note = 2'-fluorouridine
  modified_base 8: mod_base = OTHER; note = 2'-O-methylcytidine
  modified_base 9: mod_base = OTHER; note = 2'-fluoroadenosine
  modified_base 10: mod_base = OTHER; note = 2'-fluorocytidine
  modified_base 11: mod_base = OTHER; note = 2'-fluoroguanosine
  modified_base 12: mod_base = OTHER; note = 2'-O-methylcytidine
  modified_base 13: mod_base = OTHER; note = 2'-O-methyluridine
  modified_base 14: mod_base = OTHER; note = 2'-O-methylguanosine
  modified_base 15: mod_base = OTHER; note = 2'-O-methyluridine
  modified_base 16: mod_base = OTHER; note = 2'-O-methyladenosine
  modified_base 17: mod_base = OTHER; note = 2'-O-methylguanosine
  modified_base 18: mod_base = OTHER; note = 2'-O-methylcytidine
  modified_base 19: mod_base = OTHER; note = 2'-O-methyladenosine
  modified_base 20: mod_base = OTHER; note = 2'-O-methylguanosine
  modified_base 21: mod_base = OTHER; note = 2'-O-methyladenosine
ccagcgtcacgctgtagcaga

SEQ ID NO: 676 - RNA, 21 nt, synthetic construct
  source 1..21: mol_type = other RNA
  modified_base 1: mod_base = OTHER; note = 2'-O-methylcytidine with phosphorothioate linkage
  modified_base 2: mod_base = OTHER; note = 2'-O-methyladenosine with phosphorothioate linkage
  modified_base 3: mod_base = OTHER; note = 2'-O-methylguanosine
  modified_base 4: mod_base = OTHER; note = 2'-O-methylcytidine
  modified_base 5: mod_base = OTHER; note = 2'-O-methylguanosine
  modified_base 6: mod_base = OTHER; note = 2'-O-methyluridine
  modified_base 7: mod_base = OTHER; note = 2'-fluorocytidine
  modified_base 8: mod_base = OTHER; note = 2'-O-methyladenosine
  modified_base 9: mod_base = OTHER; note = 2'-fluorocytidine
  modified_base 10: mod_base = OTHER; note = 2'-fluoroguanosine
  modified_base 11: mod_base = OTHER; note = 2'-fluorocytidine
  modified_base 12: mod_base = OTHER; note = 2'-O-methyluridine
  modified_base 13: mod_base = OTHER; note = 2'-O-methylguanosine
  modified_base 14: mod_base = OTHER; note = 2'-O-methyluridine
  modified_base 15: mod_base = OTHER; note = 2'-O-methyladenosine
  modified_base 16: mod_base = OTHER; note = 2'-O-methylguanosine
  modified_base 17: mod_base = OTHER; note = 2'-O-methylcytidine
  modified_base 18: mod_base = OTHER; note = 2'-O-methyladenosine
  modified_base 19: mod_base = OTHER; note = 2'-O-methylguanosine
  modified_base 20: mod_base = OTHER; note = 2'-O-methylcytidine
  modified_base 21: mod_base = OTHER; note = 2'-O-methyladenosine
cagcgtcacgctgtagcagca

SEQ ID NO: 677 - RNA, 21 nt, synthetic construct
  source 1..21: mol_type = other RNA
  modified_base 1: mod_base = OTHER; note = 2'-O-methylguanosine with phosphorothioate linkage
  modified_base 2: mod_base = OTHER; note = 2'-O-methylcytidine with phosphorothioate linkage
  modified_base 3: mod_base = OTHER; note = 2'-O-methylguanosine
  modified_base 4: mod_base = OTHER; note = 2'-O-methyluridine
  modified_base 5: mod_base = OTHER; note = 2'-O-methylcytidine
  modified_base 6: mod_base = OTHER; note = 2'-O-methyladenosine
  modified_base 7: mod_base = OTHER; note = 2'-fluorocytidine
  modified_base 8: mod_base = OTHER; note = 2'-O-methylguanosine
  modified_base 9: mod_base = OTHER; note = 2'-fluorocytidine
  modified_base 10: mod_base = OTHER; note = 2'-fluorouridine
  modified_base 11: mod_base = OTHER; note = 2'-fluoroguanosine
  modified_base 12: mod_base = OTHER; note = 2'-O-methyluridine
  modified_base 13: mod_base = OTHER; note = 2'-O-methyladenosine
  modified_base 14: mod_base = OTHER; note = 2'-O-methylguanosine
  modified_base 15: mod_base = OTHER; note = 2'-O-methylcytidine
  modified_base 16: mod_base = OTHER; note = 2'-O-methyladenosine
  modified_base 17: mod_base = OTHER; note = 2'-O-methylguanosine
  modified_base 18: mod_base = OTHER; note = 2'-O-methylcytidine
  modified_base 19: mod_base = OTHER; note = 2'-O-methylcytidine
  modified_base 20: mod_base = OTHER; note = 2'-O-methylguanosine
  modified_base 21: mod_base = OTHER; note = 2'-O-methyladenosine
gcgtcacgctgtagcagccga

SEQ ID NO: 678 - RNA, 21 nt, synthetic construct
  source 1..21: mol_type = other RNA
  modified_base 1: mod_base = OTHER; note = 2'-O-methylcytidine with phosphorothioate linkage
  modified_base 2: mod_base = OTHER; note = 2'-O-methylguanosine with phosphorothioate linkage
  modified_base 3: mod_base = OTHER; note = 2'-O-methyluridine
  modified_base 4: mod_base = OTHER; note = 2'-O-methylcytidine
  modified_base 5: mod_base = OTHER; note = 2'-O-methyladenosine
  modified_base 6: mod_base = OTHER; note = 2'-O-methylcytidine
  modified_base 7: mod_base = OTHER; note = 2'-fluoroguanosine
  modified_base 8: mod_base = OTHER; note = 2'-O-methylcytidine
  modified_base 9: mod_base = OTHER; note = 2'-fluorouridine
  modified_base 10: mod_base = OTHER; note = 2'-fluoroguanosine
  modified_base 11: mod_base = OTHER; note = 2'-fluorouridine
  modified_base 12: mod_base = OTHER; note = 2'-O-methyladenosine
  modified_base 13: mod_base = OTHER; note = 2'-O-methylguanosine
  modified_base 14: mod_base = OTHER; note = 2'-O-methylcytidine
  modified_base 15: mod_base = OTHER; note = 2'-O-methyladenosine
  modified_base 16: mod_base = OTHER; note = 2'-O-methylguanosine
  modified_base 17: mod_base = OTHER; note = 2'-O-methylcytidine
  modified_base 18: mod_base = OTHER; note = 2'-O-methylcytidine
  modified_base 19: mod_base = OTHER; note = 2'-O-methylguanosine
  modified_base 20: mod_base = OTHER; note = 2'-O-methyladenosine
  modified_base 21: mod_base = OTHER; note = 2'-O-methyladenosine
cgtcacgctgtagcagccgaa

SEQ ID NO: 679 - RNA, 21 nt, synthetic construct
  source 1..21: mol_type = other RNA
  modified_base 1: mod_base = OTHER; note = 2'-O-methylguanosine with phosphorothioate linkage
  modified_base 2: mod_base = OTHER; note = 2'-O-methyluridine with phosphorothioate linkage
  modified_base 3: mod_base = OTHER; note = 2'-O-methylcytidine
  modified_base 4: mod_base = OTHER; note = 2'-O-methyladenosine
  modified_base 5: mod_base = OTHER; note = 2'-O-methylcytidine
  modified_base 6: mod_base = OTHER; note = 2'-O-methylguanosine
  modified_base 7: mod_base = OTHER; note = 2'-fluorocytidine
  modified_base 8: mod_base = OTHER; note = 2'-O-methyluridine
  modified_base 9: mod_base = OTHER; note = 2'-fluoroguanosine
  modified_base 10: mod_base = OTHER; note = 2'-fluorouridine
  modified_base 11: mod_base = OTHER; note = 2'-fluoroadenosine
  modified_base 12: mod_base = OTHER; note = 2'-O-methylguanosine
  modified_base 13: mod_base = OTHER; note = 2'-O-methylcytidine
  modified_base 14: mod_base = OTHER; note = 2'-O-methyladenosine
  modified_base 15: mod_base = OTHER; note = 2'-O-methylguanosine
  modified_base 16: mod_base = OTHER; note = 2'-O-methylcytidine
  modified_base 17: mod_base = OTHER; note = 2'-O-methylcytidine
  modified_base 18: mod_base = OTHER; note = 2'-O-methylguanosine
  modified_base 19: mod_base = OTHER; note = 2'-O-methyladenosine
  modified_base 20: mod_base = OTHER; note = 2'-O-methylguanosine
  modified_base 21: mod_base = OTHER; note = 2'-O-methyladenosine
gtcacgctgtagcagccgaga

SEQ ID NO: 680 - RNA, 21 nt, synthetic construct
  source 1..21: mol_type = other RNA
  modified_base 1: mod_base = OTHER; note = 2'-O-methylcytidine with phosphorothioate linkage
  modified_base 2: mod_base = OTHER; note = 2'-O-methyladenosine with phosphorothioate linkage
  modified_base 3: mod_base = OTHER; note = 2'-O-methylcytidine
  modified_base 4: mod_base = OTHER; note = 2'-O-methylguanosine
  modified_base 5: mod_base = OTHER; note = 2'-O-methylcytidine
  modified_base 6: mod_base = OTHER; note = 2'-O-methyluridine
  modified_base 7: mod_base = OTHER; note = 2'-fluoroguanosine
  modified_base 8: mod_base = OTHER; note = 2'-O-methyluridine
  modified_base 9: mod_base = OTHER; note = 2'-fluoroadenosine
  modified_base 10: mod_base = OTHER; note = 2'-fluoroguanosine
  modified_base 11: mod_base = OTHER; note = 2'-fluorocytidine
  modified_base 12: mod_base = OTHER; note = 2'-O-methyladenosine
  modified_base 13: mod_base = OTHER; note = 2'-O-methylguanosine
  modified_base 14: mod_base = OTHER; note = 2'-O-methylcytidine
  modified_base 15: mod_base = OTHER; note = 2'-O-methylcytidine
  modified_base 16: mod_base = OTHER; note = 2'-O-methylguanosine
  modified_base 17: mod_base = OTHER; note = 2'-O-methyladenosine
  modified_base 18: mod_base = OTHER; note = 2'-O-methylguanosine
  modified_base 19: mod_base = OTHER; note = 2'-O-methylcytidine
  modified_base 20: mod_base = OTHER; note = 2'-O-methyladenosine
  modified_base 21: mod_base = OTHER; note = 2'-O-methyladenosine
cacgctgtagcagccgagcaa

SEQ ID NO: 681 - RNA, 21 nt, synthetic construct
  source 1..21: mol_type = other RNA
  modified_base 1: mod_base = OTHER; note = 2'-O-methyladenosine with phosphorothioate linkage
  modified_base 2: mod_base = OTHER; note = 2'-O-methylcytidine with phosphorothioate linkage
  modified_base 3: mod_base = OTHER; note = 2'-O-methylguanosine
  modified_base 4: mod_base = OTHER; note = 2'-O-methylcytidine
  modified_base 5: mod_base = OTHER; note = 2'-O-methyluridine
  modified_base 6: mod_base = OTHER; note = 2'-O-methylguanosine
  modified_base 7: mod_base = OTHER; note = 2'-fluorouridine
  modified_base 8: mod_base = OTHER; note = 2'-O-methyladenosine
  modified_base 9: mod_base = OTHER; note = 2'-fluoroguanosine
  modified_base 10: mod_base = OTHER; note = 2'-fluorocytidine
  modified_base 11: mod_base = OTHER; note = 2'-fluoroadenosine
  modified_base 12: mod_base = OTHER; note = 2'-O-methylguanosine
  modified_base 13: mod_base = OTHER; note = 2'-O-methylcytidine
  modified_base 14: mod_base = OTHER; note = 2'-O-methylcytidine
  modified_base 15: mod_base = OTHER; note = 2'-O-methylguanosine
  modified_base 16: mod_base = OTHER; note = 2'-O-methyladenosine
  modified_base 17: mod_base = OTHER; note = 2'-O-methylguanosine
  modified_base 18: mod_base = OTHER; note = 2'-O-methylcytidine
  modified_base 19: mod_base = OTHER; note = 2'-O-methyladenosine
  modified_base 20: mod_base = OTHER; note = 2'-O-methyluridine
  modified_base 21: mod_base = OTHER; note = 2'-O-methyladenosine
acgctgtagcagccgagcata

SEQ ID NO: 682 - RNA, 21 nt, synthetic construct
  source 1..21: mol_type = other RNA
  modified_base 1: mod_base = OTHER; note = 2'-O-methylguanosine with phosphorothioate linkage
  modified_base 2: mod_base = OTHER; note = 2'-O-methylcytidine with phosphorothioate linkage
  modified_base 3: mod_base = OTHER; note = 2'-O-methyluridine
  modified_base 4: mod_base = OTHER; note = 2'-O-methylguanosine
  modified_base 5: mod_base = OTHER; note = 2'-O-methyluridine
  modified_base 6: mod_base = OTHER; note = 2'-O-methyladenosine
  modified_base 7: mod_base = OTHER; note = 2'-fluoroguanosine
  modified_base 8: mod_base = OTHER; note = 2'-O-methylcytidine
  modified_base 9: mod_base = OTHER; note = 2'-fluoroadenosine
  modified_base 10: mod_base = OTHER; note = 2'-fluoroguanosine
  modified_base 11: mod_base = OTHER; note = 2'-fluorocytidine
  modified_base 12: mod_base = OTHER; note = 2'-O-methylcytidine
  modified_base 13: mod_base = OTHER; note = 2'-O-methylguanosine
  modified_base 14: mod_base = OTHER; note = 2'-O-methyladenosine
  modified_base 15: mod_base = OTHER; note = 2'-O-methylguanosine
  modified_base 16: mod_base = OTHER; note = 2'-O-methylcytidine
  modified_base 17: mod_base = OTHER; note = 2'-O-methyladenosine
  modified_base 18: mod_base = OTHER; note = 2'-O-methyluridine
  modified_base 19: mod_base = OTHER; note = 2'-O-methylcytidine
  modified_base 20: mod_base = OTHER; note = 2'-O-methyladenosine
  modified_base 21: mod_base = OTHER; note = 2'-O-methyladenosine
gctgtagcagccgagcatcaa

SEQ ID NO: 683 - RNA, 21 nt, synthetic construct
  source 1..21: mol_type = other RNA
  modified_base 1: mod_base = OTHER; note = 2'-O-methyladenosine with phosphorothioate linkage
  modified_base 2: mod_base = OTHER; note = 2'-O-methylguanosine with phosphorothioate linkage
  modified_base 3: mod_base = OTHER; note = 2'-O-methylcytidine
  modified_base 4: mod_base = OTHER; note = 2'-O-methylcytidine
  modified_base 5: mod_base = OTHER; note = 2'-O-methylguanosine
  modified_base 6: mod_base = OTHER; note = 2'-O-methyladenosine
  modified_base 7: mod_base = OTHER; note = 2'-fluoroguanosine
  modified_base 8: mod_base = OTHER; note = 2'-O-methylcytidine
  modified_base 9: mod_base = OTHER; note = 2'-fluoroadenosine
  modified_base 10: mod_base = OTHER; note = 2'-fluorouridine
  modified_base 11: mod_base = OTHER; note = 2'-fluorocytidine
  modified_base 12: mod_base = OTHER; note = 2'-O-methyladenosine
  modified_base 13: mod_base = OTHER; note = 2'-O-methylguanosine
  modified_base 14: mod_base = OTHER; note = 2'-O-methylcytidine
  modified_base 15: mod_base = OTHER; note = 2'-O-methylcytidine
  modified_base 16: mod_base = OTHER; note = 2'-O-methylcytidine
  modified_base 17: mod_base = OTHER; note = 2'-O-methylguanosine
  modified_base 18: mod_base = OTHER; note = 2'-O-methyladenosine
  modified_base 19: mod_base = OTHER; note = 2'-O-methyladenosine
  modified_base 20: mod_base = OTHER; note = 2'-O-methyladenosine
  modified_base 21: mod_base = OTHER; note = 2'-O-methyladenosine
agccgagcatcagcccgaaaa

SEQ ID NO: 684 - RNA, 21 nt, synthetic construct
  source 1..21: mol_type = other RNA
  modified_base 1: mod_base = OTHER; note = 2'-O-methylcytidine with phosphorothioate linkage
  modified_base 2: mod_base = OTHER; note = 2'-O-methylguanosine with phosphorothioate linkage
  modified_base 3: mod_base = OTHER; note = 2'-O-methyladenosine
  modified_base 4: mod_base = OTHER; note = 2'-O-methylguanosine
  modified_base 5: mod_base = OTHER; note = 2'-O-methylcytidine
  modified_base 6: mod_base = OTHER; note = 2'-O-methyladenosine
  modified_base 7: mod_base = OTHER; note = 2'-fluorouridine
  modified_base 8: mod_base = OTHER; note = 2'-O-methylcytidine
  modified_base 9: mod_base = OTHER; note = 2'-fluoroadenosine
  modified_base 10: mod_base = OTHER; note = 2'-fluoroguanosine
  modified_base 11: mod_base = OTHER; note = 2'-fluorocytidine
  modified_base 12: mod_base = OTHER; note = 2'-O-methylcytidine
  modified_base 13: mod_base = OTHER; note = 2'-O-methylcytidine
  modified_base 14: mod_base = OTHER; note = 2'-O-methylguanosine
  modified_base 15: mod_base = OTHER; note = 2'-O-methyladenosine
  modified_base 16: mod_base = OTHER; note = 2'-O-methyladenosine
  modified_base 17: mod_base = OTHER; note = 2'-O-methyladenosine
  modified_base 18: mod_base = OTHER; note = 2'-O-methylguanosine
  modified_base 19: mod_base = OTHER; note = 2'-O-methylguanosine
  modified_base 20: mod_base = OTHER; note = 2'-O-methyladenosine
  modified_base 21: mod_base = OTHER; note = 2'-O-methyladenosine
cgagcatcagcccgaaaggaa

SEQ ID NO: 685 - RNA, 21 nt, synthetic construct
  source 1..21: mol_type = other RNA
  modified_base 1: mod_base = OTHER; note = 2'-O-methylcytidine with phosphorothioate linkage
  modified_base 2: mod_base = OTHER; note = 2'-O-methyladenosine with phosphorothioate linkage
  modified_base 3: mod_base = OTHER; note = 2'-O-methylguanosine
  modified_base 4: mod_base = OTHER; note = 2'-O-methylcytidine
  modified_base 5: mod_base = OTHER; note = 2'-O-methylcytidine
  modified_base 6: mod_base = OTHER; note = 2'-O-methylcytidine
  modified_base 7: mod_base = OTHER; note = 2'-fluoroguanosine
  modified_base 8: mod_base = OTHER; note = 2'-O-methyladenosine
  modified_base 9: mod_base = OTHER; note = 2'-fluoroadenosine
  modified_base 10: mod_base = OTHER; note = 2'-fluoroadenosine
  modified_base 11: mod_base = OTHER; note = 2'-fluoroguanosine
  modified_base 12: mod_base = OTHER; note = 2'-O-methylguanosine
  modified_base 13: mod_base = OTHER; note = 2'-O-methyladenosine
  modified_base 14: mod_base = OTHER; note = 2'-O-methyladenosine
  modified_base 15: mod_base = OTHER; note = 2'-O-methylguanosine
  modified_base 16: mod_base = OTHER; note = 2'-O-methylcytidine
  modified_base 17: mod_base = OTHER; note = 2'-O-methyladenosine
  modified_base 18: mod_base = OTHER; note = 2'-O-methylcytidine
  modified_base 19: mod_base = OTHER; note = 2'-O-methylguanosine
  modified_base 20: mod_base = OTHER; note = 2'-O-methyladenosine
  modified_base 21: mod_base = OTHER; note = 2'-O-methyladenosine
cagcccgaaaggaagcacgaa

SEQ ID NO: 686 - RNA, 21 nt, synthetic construct
  source 1..21: mol_type = other RNA
  modified_base 1: mod_base = OTHER; note = 2'-O-methyladenosine with phosphorothioate linkage
  modified_base 2: mod_base = OTHER; note = 2'-O-methylguanosine with phosphorothioate linkage
  modified_base 3: mod_base = OTHER; note = 2'-O-methylcytidine
  modified_base 4: mod_base = OTHER; note = 2'-O-methylcytidine
  modified_base 5: mod_base = OTHER; note = 2'-O-methylcytidine
  modified_base 6: mod_base = OTHER; note = 2'-O-methylguanosine
  modified_base 7: mod_base = OTHER; note = 2'-fluoroadenosine
  modified_base 8: mod_base = OTHER; note = 2'-O-methyladenosine
  modified_base 9: mod_base = OTHER; note = 2'-fluoroadenosine
  modified_base 10: mod_base = OTHER; note = 2'-fluoroguanosine
  modified_base 11: mod_base = OTHER; note = 2'-fluoroguanosine
  modified_base 12: mod_base = OTHER; note = 2'-O-methyladenosine
  modified_base 13: mod_base = OTHER; note = 2'-O-methyladenosine
  modified_base 14: mod_base = OTHER; note = 2'-O-methylguanosine
  modified_base 15: mod_base = OTHER; note = 2'-O-methylcytidine
  modified_base 16: mod_base = OTHER; note = 2'-O-methyladenosine
  modified_base 17: mod_base = OTHER; note = 2'-O-methylcytidine
  modified_base 18: mod_base = OTHER; note = 2'-O-methylguanosine
  modified_base 19: mod_base = OTHER; note = 2'-O-methyladenosine
  modified_base 20: mod_base = OTHER; note = 2'-O-methyladenosine
  modified_base 21: mod_base = OTHER; note = 2'-O-methyladenosine
agcccgaaaggaagcacgaaa

SEQ ID NO: 687 - RNA, 21 nt, synthetic construct
  source 1..21: mol_type = other RNA
  modified_base 1: mod_base = OTHER; note = 2'-O-methylguanosine with phosphorothioate linkage
  modified_base 2: mod_base = OTHER; note = 2'-O-methylcytidine with phosphorothioate linkage
  modified_base 3: mod_base = OTHER; note = 2'-O-methylcytidine
  modified_base 4: mod_base = OTHER; note = 2'-O-methylcytidine
  modified_base 5: mod_base = OTHER; note = 2'-O-methylguanosine
  modified_base 6: mod_base = OTHER; note = 2'-O-methyladenosine
  modified_base 7: mod_base = OTHER; note = 2'-fluoroadenosine
  modified_base 8: mod_base = OTHER; note = 2'-O-methyladenosine
  modified_base 9: mod_base = OTHER; note = 2'-fluoroguanosine
  modified_base 10: mod_base = OTHER; note = 2'-fluoroguanosine
  modified_base 11: mod_base = OTHER; note = 2'-fluoroadenosine
  modified_base 12: mod_base = OTHER; note = 2'-O-methyladenosine
  modified_base 13: mod_base = OTHER; note = 2'-O-methylguanosine
  modified_base 14: mod_base = OTHER; note = 2'-O-methylcytidine
  modified_base 15: mod_base = OTHER; note = 2'-O-methyladenosine
  modified_base 16: mod_base = OTHER; note = 2'-O-methylcytidine
  modified_base 17: mod_base = OTHER; note = 2'-O-methylguanosine
  modified_base 18: mod_base = OTHER; note = 2'-O-methyladenosine
  modified_base 19: mod_base = OTHER; note = 2'-O-methyladenosine
  modified_base 20: mod_base = OTHER; note = 2'-O-methyladenosine
  modified_base 21: mod_base = OTHER; note = 2'-O-methyladenosine
gcccgaaaggaagcacgaaaa

SEQ ID NO: 688 - RNA, 21 nt, synthetic construct
  source 1..21: mol_type = other RNA
  modified_base 1: mod_base = OTHER; note = 2'-O-methylcytidine with phosphorothioate linkage
  modified_base 2: mod_base = OTHER; note = 2'-O-methylguanosine with phosphorothioate linkage
  modified_base 3: mod_base = OTHER; note = 2'-O-methylguanosine
  modified_base 4: mod_base = OTHER; note = 2'-O-methylcytidine
  modified_base 5: mod_base = OTHER; note = 2'-O-methylguanosine
  modified_base 6: mod_base = OTHER; note = 2'-O-methylguanosine
  modified_base 7: mod_base = OTHER; note = 2'-fluorocytidine
  modified_base 8: mod_base = OTHER; note = 2'-O-methylguanosine
  modified_base 9: mod_base = OTHER; note = 2'-fluorouridine
  modified_base 10: mod_base = OTHER; note = 2'-fluoroguanosine
  modified_base 11: mod_base = OTHER; note = 2'-fluoroguanosine
  modified_base 12: mod_base = OTHER; note = 2'-O-methyladenosine
  modified_base 13: mod_base = OTHER; note = 2'-O-methylcytidine
  modified_base 14: mod_base = OTHER; note = 2'-O-methylcytidine
  modified_base 15: mod_base = OTHER; note = 2'-O-methylguanosine
  modified_base 16: mod_base = OTHER; note = 2'-O-methylguanosine
  modified_base 17: mod_base = OTHER; note = 2'-O-methylcytidine
  modified_base 18: mod_base = OTHER; note = 2'-O-methylguanosine
  modified_base 19: mod_base = OTHER; note = 2'-O-methyladenosine
  modified_base 20: mod_base = OTHER; note = 2'-O-methylcytidine
  modified_base 21: mod_base = OTHER; note = 2'-O-methyladenosine
cggcggcgtggaccggcgaca

SEQ ID NO: 689 - RNA, 21 nt, synthetic construct
  source 1..21: mol_type = other RNA
  modified_base 1: mod_base = OTHER; note = 2'-O-methylguanosine with phosphorothioate linkage
  modified_base 2: mod_base = OTHER; note = 2'-O-methylguanosine with phosphorothioate linkage
  modified_base 3: mod_base = OTHER; note = 2'-O-methylcytidine
  modified_base 4: mod_base = OTHER; note = 2'-O-methylguanosine
  modified_base 5: mod_base = OTHER; note = 2'-O-methylguanosine
  modified_base 6: mod_base = OTHER; note = 2'-O-methylcytidine
  modified_base 7: mod_base = OTHER; note = 2'-fluoroguanosine
  modified_base 8: mod_base = OTHER; note = 2'-O-methyluridine
  modified_base 9: mod_base = OTHER; note = 2'-fluoroguanosine
  modified_base 10: mod_base = OTHER; note = 2'-fluoroguanosine
  modified_base 11: mod_base = OTHER; note = 2'-fluoroadenosine
  modified_base 12: mod_base = OTHER; note = 2'-O-methylcytidine
  modified_base 13: mod_base = OTHER; note = 2'-O-methylcytidine
  modified_base 14: mod_base = OTHER; note = 2'-O-methylguanosine
  modified_base 15: mod_base = OTHER; note = 2'-O-methylguanosine
  modified_base 16: mod_base = OTHER; note = 2'-O-methylcytidine
  modified_base 17: mod_base = OTHER; note = 2'-O-methylguanosine
  modified_base 18: mod_base = OTHER; note = 2'-O-methyladenosine
  modified_base 19: mod_base = OTHER; note = 2'-O-methylcytidine
  modified_base 20: mod_base = OTHER; note = 2'-O-methylguanosine
  modified_base 21: mod_base = OTHER; note = 2'-O-methyladenosine
ggcggcgtggaccggcgacga

SEQ ID NO: 690 - RNA, 21 nt, synthetic construct
  source 1..21: mol_type = other RNA
  modified_base 1: mod_base = OTHER; note = 2'-O-methylguanosine with phosphorothioate linkage
  modified_base 2: mod_base = OTHER; note = 2'-O-methylcytidine with phosphorothioate linkage
  modified_base 3: mod_base = OTHER; note = 2'-O-methylguanosine
  modified_base 4: mod_base = OTHER; note = 2'-O-methylguanosine
  modified_base 5: mod_base = OTHER; note = 2'-O-methylcytidine
  modified_base 6: mod_base = OTHER; note = 2'-O-methylguanosine
  modified_base 7: mod_base = OTHER; note = 2'-fluorouridine
  modified_base 8: mod_base = OTHER; note = 2'-O-methylguanosine
  modified_base 9: mod_base = OTHER; note = 2'-fluoroguanosine
  modified_base 10: mod_base = OTHER; note = 2'-fluoroadenosine
  modified_base 11: mod_base = OTHER; note = 2'-fluorocytidine
  modified_base 12: mod_base = OTHER; note = 2'-O-methylcytidine
  modified_base 13: mod_base = OTHER; note = 2'-O-methylguanosine
  modified_base 14: mod_base = OTHER; note = 2'-O-methylguanosine
  modified_base 15: mod_base = OTHER; note = 2'-O-methylcytidine
  modified_base 16: mod_base = OTHER; note = 2'-O-methylguanosine
  modified_base 17: mod_base = OTHER; note = 2'-O-methyladenosine
  modified_base 18: mod_base = OTHER; note = 2'-O-methylcytidine
  modified_base 19: mod_base = OTHER; note = 2'-O-methylguanosine
  modified_base 20: mod_base = OTHER; note = 2'-O-methylguanosine
  modified_base 21: mod_base = OTHER; note = 2'-O-methyladenosine
gcggcgtggaccggcgacgga

SEQ ID NO: 691 - RNA, 21 nt, synthetic construct
  source 1..21: mol_type = other RNA
  modified_base 1: mod_base = OTHER; note = 2'-O-methylguanosine with phosphorothioate linkage
  modified_base 2: mod_base = OTHER; note = 2'-O-methyluridine with phosphorothioate linkage
  modified_base 3: mod_base = OTHER; note = 2'-O-methylguanosine
  modified_base 4: mod_base = OTHER; note = 2'-O-methylguanosine
  modified_base 5: mod_base = OTHER; note = 2'-O-methyladenosine
  modified_base 6: mod_base = OTHER; note = 2'-O-methylcytidine
  modified_base 7: mod_base = OTHER; note = 2'-fluorocytidine
  modified_base 8: mod_base = OTHER; note = 2'-O-methylguanosine
  modified_base 9: mod_base = OTHER; note = 2'-fluoroguanosine
  modified_base 10: mod_base = OTHER; note = 2'-fluorocytidine
  modified_base 11: mod_base = OTHER; note = 2'-fluoroguanosine
  modified_base 12: mod_base = OTHER; note = 2'-O-methyladenosine
  modified_base 13: mod_base = OTHER; note = 2'-O-methylcytidine
  modified_base 14: mod_base = OTHER; note = 2'-O-methylguanosine
  modified_base 15: mod_base = OTHER; note = 2'-O-methylguanosine
  modified_base 16: mod_base = OTHER; note = 2'-O-methylguanosine
  modified_base 17: mod_base = OTHER; note = 2'-O-methyluridine
  modified_base 18: mod_base = OTHER; note = 2'-O-methylguanosine
  modified_base 19: mod_base = OTHER; note = 2'-O-methylguanosine
  modified_base 20: mod_base = OTHER; note = 2'-O-methylcytidine
  modified_base 21: mod_base = OTHER; note = 2'-O-methyladenosine
gtggaccggcgacgggtggca

SEQ ID NO: 692 - RNA, 21 nt, synthetic construct
  source 1..21: mol_type = other RNA
  modified_base 1: mod_base = OTHER; note = 2'-O-methyluridine with phosphorothioate linkage
  modified_base 2: mod_base = OTHER; note = 2'-O-methylguanosine with phosphorothioate linkage
  modified_base 3: mod_base = OTHER; note = 2'-O-methylguanosine
  modified_base 4: mod_base = OTHER; note = 2'-O-methyladenosine
  modified_base 5: mod_base = OTHER; note = 2'-O-methylcytidine
  modified_base 6: mod_base = OTHER; note = 2'-O-methylcytidine
  modified_base 7: mod_base = OTHER; note = 2'-fluoroguanosine
  modified_base 8: mod_base = OTHER; note = 2'-O-methylguanosine
  modified_base 9: mod_base = OTHER; note = 2'-fluorocytidine
  modified_base 10: mod_base = OTHER; note = 2'-fluoroguanosine
  modified_base 11: mod_base = OTHER; note = 2'-fluoroadenosine
  modified_base 12: mod_base = OTHER; note = 2'-O-methylcytidine
  modified_base 13: mod_base = OTHER; note = 2'-O-methylguanosine
  modified_base 14: mod_base = OTHER; note = 2'-O-methylguanosine
  modified_base 15: mod_base = OTHER; note = 2'-O-methylguanosine
  modified_base 16: mod_base = OTHER; note = 2'-O-methyluridine
  modified_base 17: mod_base = OTHER; note = 2'-O-methylguanosine
  modified_base 18: mod_base = OTHER; note = 2'-O-methylguanosine
  modified_base 19: mod_base = OTHER; note = 2'-O-methylcytidine
  modified_base 20: mod_base = OTHER; note = 2'-O-methyladenosine
  modified_base 21: mod_base = OTHER; note = 2'-O-methyladenosine
tggaccggcgacgggtggcaa

SEQ ID NO: 693 - RNA, 21 nt, synthetic construct
  source 1..21: mol_type = other RNA
  modified_base 1: mod_base = OTHER; note = 2'-O-methylguanosine with phosphorothioate linkage
  modified_base 2: mod_base = OTHER; note = 2'-O-methylguanosine with phosphorothioate linkage
  modified_base 3: mod_base = OTHER; note = 2'-O-methyladenosine
  modified_base 4: mod_base = OTHER; note = 2'-O-methylcytidine
  modified_base 5: mod_base = OTHER; note = 2'-O-methylcytidine
  modified_base 6: mod_base = OTHER; note = 2'-O-methylguanosine
  modified_base 7: mod_base = OTHER; note = 2'-fluoroguanosine
  modified_base 8: mod_base = OTHER; note = 2'-O-methylcytidine
  modified_base 9: mod_base = OTHER; note = 2'-fluoroguanosine
  modified_base 10: mod_base = OTHER; note = 2'-fluoroadenosine
  modified_base 11: mod_base = OTHER; note = 2'-fluorocytidine
  modified_base 12: mod_base = OTHER; note = 2'-O-methylguanosine
  modified_base 13: mod_base = OTHER; note = 2'-O-methylguanosine
  modified_base 14: mod_base = OTHER; note = 2'-O-methylguanosine
  modified_base 15: mod_base = OTHER; note = 2'-O-methyluridine
  modified_base 16: mod_base = OTHER; note = 2'-O-methylguanosine
  modified_base 17: mod_base = OTHER; note = 2'-O-methylguanosine
  modified_base 18: mod_base = OTHER; note = 2'-O-methylcytidine
  modified_base 19: mod_base = OTHER; note = 2'-O-methyladenosine
  modified_base 20: mod_base = OTHER; note = 2'-O-methylcytidine
  modified_base 21: mod_base = OTHER; note = 2'-O-methyladenosine
ggaccggcgacgggtggcaca

SEQ ID NO: 694 - RNA, 21 nt, synthetic construct
  source 1..21: mol_type = other RNA
  modified_base 1: mod_base = OTHER; note = 2'-O-methylguanosine with phosphorothioate linkage
  modified_base 2: mod_base = OTHER; note = 2'-O-methyladenosine with phosphorothioate linkage
  modified_base 3: mod_base = OTHER; note = 2'-O-methylcytidine
  modified_base 4: mod_base = OTHER; note = 2'-O-methylcytidine
  modified_base 5: mod_base = OTHER; note = 2'-O-methylguanosine
  modified_base 6: mod_base = OTHER; note = 2'-O-methylguanosine
  modified_base 7: mod_base = OTHER; note = 2'-fluorocytidine
  modified_base 8: mod_base = OTHER; note = 2'-O-methylguanosine
  modified_base 9: mod_base = OTHER; note = 2'-fluoroadenosine
  modified_base 10: mod_base = OTHER; note = 2'-fluorocytidine
  modified_base 11: mod_base = OTHER; note = 2'-fluoroguanosine
  modified_base 12: mod_base = OTHER; note = 2'-O-methylguanosine
  modified_base 13: mod_base = OTHER; note = 2'-O-methylguanosine
  modified_base 14: mod_base = OTHER; note = 2'-O-methyluridine
  modified_base 15: mod_base = OTHER; note = 2'-O-methylguanosine
  modified_base 16: mod_base = OTHER; note = 2'-O-methylguanosine
  modified_base 17: mod_base = OTHER; note = 2'-O-methylcytidine
  modified_base 18: mod_base = OTHER; note = 2'-O-methyladenosine
  modified_base 19: mod_base = OTHER; note = 2'-O-methylcytidine
  modified_base 20: mod_base = OTHER; note = 2'-O-methyladenosine
  modified_base 21: mod_base = OTHER; note = 2'-O-methyladenosine
gaccggcgacgggtggcacaa

SEQ ID NO: 695 - RNA, 21 nt, synthetic construct
  source 1..21: mol_type = other RNA
  modified_base 1: mod_base = OTHER; note = 2'-O-methylcytidine with phosphorothioate linkage
  modified_base 2: mod_base = OTHER; note = 2'-O-methylguanosine with phosphorothioate linkage
  modified_base 3: mod_base = OTHER; note = 2'-O-methylguanosine
  modified_base 4: mod_base = OTHER; note = 2'-O-methylcytidine
  modified_base 5: mod_base = OTHER; note = 2'-O-methylguanosine
  modified_base 6: mod_base = OTHER; note = 2'-O-methyladenosine
  modified_base 7: mod_base = OTHER; note = 2'-fluorocytidine
  modified_base 8: mod_base = OTHER; note = 2'-O-methylguanosine
  modified_base 9: mod_base = OTHER; note = 2'-fluoroguanosine
  modified_base 10: mod_base = OTHER; note = 2'-fluoroguanosine
  modified_base 11: mod_base = OTHER; note = 2'-fluorouridine
  modified_base 12: mod_base = OTHER; note = 2'-O-methylguanosine
  modified_base 13: mod_base = OTHER; note = 2'-O-methylguanosine
  modified_base 14: mod_base = OTHER; note = 2'-O-methylcytidine
  modified_base 15: mod_base = OTHER; note = 2'-O-methyladenosine
  modified_base 16: mod_base = OTHER; note = 2'-O-methylcytidine
  modified_base 17: mod_base = OTHER; note = 2'-O-methyladenosine
  modified_base 18: mod_base = OTHER; note = 2'-O-methylguanosine
  modified_base 19: mod_base = OTHER; note = 2'-O-methylcytidine
  modified_base 20: mod_base = OTHER; note = 2'-O-methyluridine
  modified_base 21: mod_base = OTHER; note = 2'-O-methyladenosine
cggcgacgggtggcacagcta

SEQ ID NO: 696 - RNA, 21 nt, synthetic construct
  source 1..21: mol_type = other RNA
  modified_base 1: mod_base = OTHER; note = 2'-O-methylguanosine with phosphorothioate linkage
  modified_base 2: mod_base = OTHER; note = 2'-O-methylcytidine with phosphorothioate linkage
  modified_base 3: mod_base = OTHER; note = 2'-O-methylguanosine
  modified_base 4: mod_base = OTHER; note = 2'-O-methyladenosine
  modified_base 5: mod_base = OTHER; note = 2'-O-methylcytidine
  modified_base 6: mod_base = OTHER; note = 2'-O-methylguanosine
  modified_base 7: mod_base = OTHER; note = 2'-fluoroguanosine
  modified_base 8: mod_base = OTHER; note = 2'-O-methylguanosine
  modified_base 9: mod_base = OTHER; note = 2'-fluorouridine
  modified_base 10: mod_base = OTHER; note = 2'-fluoroguanosine
  modified_base 11: mod_base = OTHER; note = 2'-fluoroguanosine
  modified_base 12: mod_base = OTHER; note = 2'-O-methylcytidine
  modified_base 13: mod_base = OTHER; note = 2'-O-methyladenosine
  modified_base 14: mod_base = OTHER; note = 2'-O-methylcytidine
  modified_base 15: mod_base = OTHER; note = 2'-O-methyladenosine
  modified_base 16: mod_base = OTHER; note = 2'-O-methylguanosine
  modified_base 17: mod_base = OTHER; note = 2'-O-methylcytidine
  modified_base 18: mod_base = OTHER; note = 2'-O-methyluridine
  modified_base 19: mod_base = OTHER; note = 2'-O-methylguanosine
  modified_base 20: mod_base = OTHER; note = 2'-O-methylguanosine
  modified_base 21: mod_base = OTHER; note = 2'-O-methyladenosine
gcgacgggtggcacagctgga

SEQ ID NO: 697 - RNA, 21 nt, synthetic construct
  source 1..21: mol_type = other RNA
  modified_base 1: mod_base = OTHER; note = 2'-O-methylguanosine with phosphorothioate linkage
  modified_base 2: mod_base = OTHER; note = 2'-O-methylguanosine with phosphorothioate linkage
  modified_base 3: mod_base = OTHER; note = 2'-O-methyluridine
  modified_base 4: mod_base = OTHER; note = 2'-O-methylguanosine
  modified_base 5: mod_base = OTHER; note = 2'-O-methylguanosine
  modified_base 6: mod_base = OTHER; note = 2'-O-methylcytidine
  modified_base 7: mod_base = OTHER; note = 2'-fluoroadenosine
  modified_base 8: mod_base = OTHER; note = 2'-O-methylcytidine
  modified_base 9: mod_base = OTHER; note = 2'-fluoroadenosine
  modified_base 10: mod_base = OTHER; note = 2'-fluoroguanosine
  modified_base 11: mod_base = OTHER; note = 2'-fluorocytidine
  modified_base 12: mod_base = OTHER; note = 2'-O-methyluridine
  modified_base 13: mod_base = OTHER; note = 2'-O-methylguanosine
  modified_base 14: mod_base = OTHER; note = 2'-O-methylguanosine
  modified_base 15: mod_base = OTHER; note = 2'-O-methylcytidine
  modified_base 16: mod_base = OTHER; note = 2'-O-methyladenosine
  modified_base 17: mod_base = OTHER; note = 2'-O-methyluridine
  modified_base 18: mod_base = OTHER; note = 2'-O-methyladenosine
  modified_base 19: mod_base = OTHER; note = 2'-O-methylcytidine
  modified_base 20: mod_base = OTHER; note = 2'-O-methylguanosine
  modified_base 21: mod_base = OTHER; note = 2'-O-methyladenosine
ggtggcacagctggcatacga

SEQ ID NO: 698 - RNA, 21 nt, synthetic construct
  source 1..21: mol_type = other RNA
  modified_base 1: mod_base = OTHER; note = 2'-O-methylguanosine with phosphorothioate linkage
  modified_base 2: mod_base = OTHER; note = 2'-O-methyluridine with phosphorothioate linkage
  modified_base 3: mod_base = OTHER; note = 2'-O-methylguanosine
  modified_base 4: mod_base = OTHER; note = 2'-O-methylguanosine
  modified_base 5: mod_base = OTHER; note = 2'-O-methylcytidine
  modified_base 6: mod_base = OTHER; note = 2'-O-methyladenosine
  modified_base 7: mod_base = OTHER; note = 2'-fluorocytidine
  modified_base 8: mod_base = OTHER; note = 2'-O-methyladenosine
  modified_base 9: mod_base = OTHER; note = 2'-fluoroguanosine
  modified_base 10: mod_base = OTHER; note = 2'-fluorocytidine
  modified_base 11: mod_base = OTHER; note = 2'-fluorouridine
  modified_base 12: mod_base = OTHER; note = 2'-O-methylguanosine
  modified_base 13: mod_base = OTHER; note = 2'-O-methylguanosine
  modified_base 14: mod_base = OTHER; note = 2'-O-methylcytidine
  modified_base 15: mod_base = OTHER; note = 2'-O-methyladenosine
  modified_base 16: mod_base = OTHER; note = 2'-O-methyluridine
  modified_base 17: mod_base = OTHER; note = 2'-O-methyladenosine
  modified_base 18: mod_base = OTHER; note = 2'-O-methylcytidine
  modified_base 19: mod_base = OTHER; note = 2'-O-methylguanosine
  modified_base 20: mod_base = OTHER; note = 2'-O-methylcytidine
  modified_base 21: mod_base = OTHER; note = 2'-O-methyladenosine
gtggcacagctggcatacgca

SEQ ID NO: 699 - RNA, 21 nt, synthetic construct
  source 1..21: mol_type = other RNA
  modified_base 1: mod_base = OTHER; note = 2'-O-methyluridine with phosphorothioate linkage
  modified_base 2: mod_base = OTHER; note = 2'-O-methylguanosine with phosphorothioate linkage
  modified_base 3: mod_base = OTHER; note = 2'-O-methylguanosine
  modified_base 4: mod_base = OTHER; note = 2'-O-methylcytidine
  modified_base 5: mod_base = OTHER; note = 2'-O-methyladenosine
  modified_base 6: mod_base = OTHER; note = 2'-O-methylcytidine
  modified_base 7: mod_base = OTHER; note = 2'-fluoroadenosine
  modified_base 8: mod_base = OTHER; note = 2'-O-methylguanosine
  modified_base 9: mod_base = OTHER; note = 2'-fluorocytidine
  modified_base 10: mod_base = OTHER; note = 2'-fluorouridine
  modified_base 11: mod_base = OTHER; note = 2'-fluoroguanosine
  modified_base 12: mod_base = OTHER; note = 2'-O-methylguanosine
  modified_base 13: mod_base = OTHER; note = 2'-O-methylcytidine
  modified_base 14: mod_base = OTHER; note = 2'-O-methyladenosine
  modified_base 15: mod_base = OTHER; note = 2'-O-methyluridine
  modified_base 16: mod_base = OTHER; note = 2'-O-methyladenosine
  modified_base 17: mod_base = OTHER; note = 2'-O-methylcytidine
  modified_base 18: mod_base = OTHER; note = 2'-O-methylguanosine
  modified_base 19: mod_base = OTHER; note = 2'-O-methylcytidine
  modified_base 20: mod_base = OTHER; note = 2'-O-methylguanosine
  modified_base 21: mod_base = OTHER; note = 2'-O-methyladenosine
tggcacagctggcatacgcga

SEQ ID NO: 700 - RNA, 21 nt, synthetic construct
  source 1..21: mol_type = other RNA
  modified_base 1: mod_base = OTHER; note = 2'-O-methylcytidine with phosphorothioate linkage
  modified_base 2: mod_base = OTHER; note = 2'-O-methylcytidine with phosphorothioate linkage
  modified_base 3: mod_base = OTHER; note = 2'-O-methyluridine
  modified_base 4: mod_base = OTHER; note = 2'-O-methylcytidine
  modified_base 5: mod_base = OTHER; note = 2'-O-methylcytidine
  modified_base 6: mod_base = OTHER; note = 2'-O-methyladenosine
  modified_base 7: mod_base = OTHER; note = 2'-fluorocytidine
  modified_base 8: mod_base = OTHER; note = 2'-O-methyladenosine
  modified_base 9: mod_base = OTHER; note = 2'-fluoroguanosine
  modified_base 10: mod_base = OTHER; note = 2'-fluoroguanosine
  modified_base 11: mod_base = OTHER; note = 2'-fluorouridine
  modified_base 12: mod_base = OTHER; note = 2'-O-methylguanosine
  modified_base 13: mod_base = OTHER; note = 2'-O-methylguanosine
  modified_base 14: mod_base = OTHER; note = 2'-O-methylcytidine
  modified_base 15: mod_base = OTHER; note = 2'-O-methylguanosine
  modified_base 16: mod_base = OTHER; note = 2'-O-methylguanosine
  modified_base 17: mod_base = OTHER; note = 2'-O-methyluridine
  modified_base 18: mod_base = OTHER; note = 2'-O-methyladenosine
  modified_base 19: mod_base = OTHER; note = 2'-O-methylguanosine
  modified_base 20: mod_base = OTHER; note = 2'-O-methyladenosine
  modified_base 21: mod_base = OTHER; note = 2'-O-methyladenosine
cctccacaggtggcggtagaa

SEQ ID NO: 701 - RNA, 21 nt, synthetic construct
  source 1..21: mol_type = other RNA
  modified_base 1: mod_base = OTHER; note = 2'-O-methyluridine with phosphorothioate linkage
  modified_base 2: mod_base = OTHER; note = 2'-O-methylcytidine with phosphorothioate linkage
  modified_base 3: mod_base = OTHER; note = 2'-O-methylcytidine
  modified_base 4: mod_base = OTHER; note = 2'-O-methyladenosine
  modified_base 5: mod_base = OTHER; note = 2'-O-methylcytidine
  modified_base 6: mod_base = OTHER; note = 2'-O-methyladenosine
  modified_base 7: mod_base = OTHER; note = 2'-fluoroguanosine
  modified_base 8: mod_base = OTHER; note = 2'-O-methylguanosine
  modified_base 9: mod_base = OTHER; note = 2'-fluorouridine
  modified_base 10: mod_base = OTHER; note = 2'-fluoroguanosine
  modified_base 11: mod_base = OTHER; note = 2'-fluoroguanosine
  modified_base 12: mod_base = OTHER; note = 2'-O-methylcytidine
  modified_base 13: mod_base = OTHER; note = 2'-O-methylguanosine
  modified_base 14: mod_base = OTHER; note = 2'-O-methylguanosine
  modified_base 15: mod_base = OTHER; note = 2'-O-methyluridine
  modified_base 16: mod_base = OTHER; note = 2'-O-methyladenosine
  modified_base 17: mod_base = OTHER; note = 2'-O-methylguanosine
  modified_base 18: mod_base = OTHER; note = 2'-O-methyladenosine
  modified_base 19: mod_base = OTHER; note = 2'-O-methylcytidine
  modified_base 20: mod_base = OTHER; note = 2'-O-methylguanosine
  modified_base 21: mod_base = OTHER; note = 2'-O-methyladenosine
tccacaggtggcggtagacga

SEQ ID NO: 702 - RNA, 21 nt, synthetic construct
  source 1..21: mol_type = other RNA
  modified_base 1: mod_base = OTHER; note = 2'-O-methylcytidine with phosphorothioate linkage
  modified_base 2: mod_base = OTHER; note = 2'-O-methyladenosine with phosphorothioate linkage
  modified_base 3: mod_base = OTHER; note = 2'-O-methylcytidine
  modified_base 4: mod_base = OTHER; note = 2'-O-methyladenosine
  modified_base 5: mod_base = OTHER; note = 2'-O-methylguanosine
  modified_base 6: mod_base = OTHER; note = 2'-O-methylguanosine
  modified_base 7: mod_base = OTHER; note = 2'-fluorouridine
  modified_base 8: mod_base = OTHER; note = 2'-O-methylguanosine
  modified_base 9: mod_base = OTHER; note = 2'-fluoroguanosine
  modified_base 10: mod_base = OTHER; note = 2'-fluorocytidine
  modified_base 11: mod_base = OTHER; note = 2'-fluoroguanosine
  modified_base 12: mod_base = OTHER; note = 2'-O-methylguanosine
  modified_base 13: mod_base = OTHER; note = 2'-O-methyluridine
  modified_base 14: mod_base = OTHER; note = 2'-O-methyladenosine
  modified_base 15: mod_base = OTHER; note = 2'-O-methylguanosine
  modified_base 16: mod_base = OTHER; note = 2'-O-methyladenosine
  modified_base 17: mod_base = OTHER; note = 2'-O-methylcytidine
  modified_base 18: mod_base = OTHER; note = 2'-O-methylguanosine
  modified_base 19: mod_base = OTHER; note = 2'-O-methylguanosine
  modified_base 20: mod_base = OTHER; note = 2'-O-methylcytidine
  modified_base 21: mod_base = OTHER; note = 2'-O-methyladenosine
cacaggtggcggtagacggca

SEQ ID NO: 703 - RNA, 21 nt, synthetic construct
  source 1..21: mol_type = other RNA
  modified_base 1: mod_base = OTHER; note = 2'-O-methylguanosine with phosphorothioate linkage
  modified_base 2: mod_base = OTHER; note = 2'-O-methyluridine with phosphorothioate linkage
  modified_base 3: mod_base = OTHER; note = 2'-O-methylguanosine
  modified_base 4: mod_base = OTHER; note = 2'-O-methylguanosine
  modified_base 5: mod_base = OTHER; note = 2'-O-methylcytidine
  modified_base 6: mod_base = OTHER; note = 2'-O-methylguanosine
  modified_base 7: mod_base = OTHER; note = 2'-fluoroguanosine
  modified_base 8: mod_base = OTHER; note = 2'-O-methyluridine
  modified_base 9: mod_base = OTHER; note = 2'-fluoroadenosine
  modified_base 10: mod_base = OTHER; note = 2'-fluoroguanosine
  modified_base 11: mod_base = OTHER; note = 2'-fluoroadenosine
  modified_base 12: mod_base = OTHER; note = 2'-O-methylcytidine
  modified_base 13: mod_base = OTHER; note = 2'-O-methylguanosine
  modified_base 14: mod_base = OTHER; note = 2'-O-methylguanosine
  modified_base 15: mod_base = OTHER; note = 2'-O-methylcytidine
  modified_base 16: mod_base = OTHER; note = 2'-O-methylguanosine
  modified_base 17: mod_base = OTHER; note = 2'-O-methylguanosine
  modified_base 18: mod_base = OTHER; note = 2'-O-methylcytidine
  modified_base 19: mod_base = OTHER; note = 2'-O-methylcytidine
  modified_base 20: mod_base = OTHER; note = 2'-O-methylguanosine
  modified_base 21: mod_base = OTHER; note = 2'-O-methyladenosine
gtggcggtagacggcggccga

SEQ ID NO: 704 - RNA, 21 nt, synthetic construct
  source 1..21: mol_type = other RNA
  modified_base 1: mod_base = OTHER; note = 2'-O-methylcytidine with phosphorothioate linkage
  modified_base 2: mod_base = OTHER; note = 2'-O-methylguanosine with phosphorothioate linkage
  modified_base 3: mod_base = OTHER; note = 2'-O-methylguanosine
  modified_base 4: mod_base = OTHER; note = 2'-O-methylcytidine
  modified_base 5: mod_base = OTHER; note = 2'-O-methylcytidine
  modified_base 6: mod_base = OTHER; note = 2'-O-methylguanosine
  modified_base 7: mod_base = OTHER; note = 2'-fluoroguanosine
  modified_base 8: mod_base = OTHER; note = 2'-O-methylguanosine
  modified_base 9: mod_base = OTHER; note = 2'-fluoroadenosine
  modified_base 10: mod_base = OTHER; note = 2'-fluorocytidine
  modified_base 11: mod_base = OTHER; note = 2'-fluoroguanosine
  modified_base 12: mod_base = OTHER; note = 2'-O-methylguanosine
  modified_base 13: mod_base = OTHER; note = 2'-O-methylcytidine
  modified_base 14: mod_base = OTHER; note = 2'-O-methylguanosine
  modified_base 15: mod_base = OTHER; note = 2'-O-methyladenosine
  modified_base 16: mod_base = OTHER; note = 2'-O-methylguanosine
  modified_base 17: mod_base = OTHER; note = 2'-O-methylcytidine
  modified_base 18: mod_base = OTHER; note = 2'-O-methyladenosine
  modified_base 19: mod_base = OTHER; note = 2'-O-methyladenosine
  modified_base 20: mod_base = OTHER; note = 2'-O-methylcytidine
  modified_base 21: mod_base = OTHER; note = 2'-O-methyladenosine
cggccgggacggcgagcaaca

SEQ ID NO: 705 - RNA, 21 nt, synthetic construct
  source 1..21: mol_type = other RNA
  modified_base 1: mod_base = OTHER; note = 2'-O-methylguanosine with phosphorothioate linkage
  modified_base 2: mod_base = OTHER; note = 2'-O-methylguanosine with phosphorothioate linkage
  modified_base 3: mod_base = OTHER; note = 2'-O-methylcytidine
  modified_base 4: mod_base = OTHER; note = 2'-O-methylcytidine
  modified_base 5: mod_base = OTHER; note = 2'-O-methylguanosine
  modified_base 6: mod_base = OTHER; note = 2'-O-methylguanosine
  modified_base 7: mod_base = OTHER; note = 2'-fluoroguanosine
  modified_base 8: mod_base = OTHER; note = 2'-O-methyladenosine
  modified_base 9: mod_base = OTHER; note = 2'-fluorocytidine
  modified_base 10: mod_base = OTHER; note = 2'-fluoroguanosine
  modified_base 11: mod_base = OTHER; note = 2'-fluoroguanosine
  modified_base 12: mod_base = OTHER; note = 2'-O-methylcytidine
  modified_base 13: mod_base = OTHER; note = 2'-O-methylguanosine
  modified_base 14: mod_base = OTHER; note = 2'-O-methyladenosine
  modified_base 15: mod_base = OTHER; note = 2'-O-methylguanosine
  modified_base 16: mod_base = OTHER; note = 2'-O-methylcytidine
  modified_base 17: mod_base = OTHER; note = 2'-O-methyladenosine
  modified_base 18: mod_base = OTHER; note = 2'-O-methyladenosine
  modified_base 19: mod_base = OTHER; note = 2'-O-methylcytidine
  modified_base 20: mod_base = OTHER; note = 2'-O-methyladenosine
  modified_base 21: mod_base = OTHER; note = 2'-O-methyladenosine
ggccgggacggcgagcaacaa

SEQ ID NO: 706 - RNA, 21 nt, synthetic construct
  source 1..21: mol_type = other RNA
  modified_base 1: mod_base = OTHER; note = 2'-O-methylcytidine with phosphorothioate linkage
  modified_base 2: mod_base = OTHER; note = 2'-O-methyluridine with phosphorothioate linkage
  modified_base 3: mod_base = OTHER; note = 2'-O-methylguanosine
  modified_base 4: mod_base = OTHER; note = 2'-O-methylguanosine
  modified_base 5: mod_base = OTHER; note = 2'-O-methylcytidine
  modified_base 6: mod_base = OTHER; note = 2'-O-methylguanosine
  modified_base 7: mod_base = OTHER; note = 2'-fluorouridine
  modified_base 8: mod_base = OTHER; note = 2'-O-methyladenosine
  modified_base 9: mod_base = OTHER; note = 2'-fluorocytidine
  modified_base 10: mod_base = OTHER; note = 2'-fluoroadenosine
  modified_base 11: mod_base = OTHER; note = 2'-fluorouridine
  modified_base 12: mod_base = OTHER; note = 2'-O-methylguanosine
  modified_base 13: mod_base = OTHER; note = 2'-O-methylcytidine
  modified_base 14: mod_base = OTHER; note = 2'-O-methyluridine
  modified_base 15: mod_base = OTHER; note = 2'-O-methylguanosine
  modified_base 16: mod_base = OTHER; note = 2'-O-methyladenosine
  modified_base 17: mod_base = OTHER; note = 2'-O-methylguanosine
  modified_base 18: mod_base = OTHER; note = 2'-O-methylcytidine
  modified_base 19: mod_base = OTHER; note = 2'-O-methylguanosine
  modified_base 20: mod_base = OTHER; note = 2'-O-methylcytidine
  modified_base 21: mod_base = OTHER; note = 2'-O-methyladenosine
ctggcgtacatgctgagcgca

SEQ ID NO: 707 - RNA, 21 nt, synthetic construct
  source 1..21: mol_type = other RNA
  modified_base 1: mod_base = OTHER; note = 2'-O-methyluridine with phosphorothioate linkage
  modified_base 2: mod_base = OTHER; note = 2'-O-methylguanosine with phosphorothioate linkage
  modified_base 3: mod_base = OTHER; note = 2'-O-methylguanosine
  modified_base 4: mod_base = OTHER; note = 2'-O-methylcytidine
  modified_base 5: mod_base = OTHER; note = 2'-O-methylguanosine
  modified_base 6: mod_base = OTHER; note = 2'-O-methyluridine
  modified_base 7: mod_base = OTHER; note = 2'-fluoroadenosine
  modified_base 8: mod_base = OTHER; note = 2'-O-methylcytidine
  modified_base 9: mod_base = OTHER; note = 2'-fluoroadenosine
  modified_base 10: mod_base = OTHER; note = 2'-fluorouridine
  modified_base 11: mod_base = OTHER; note = 2'-fluoroguanosine
  modified_base 12: mod_base = OTHER; note = 2'-O-methylcytidine
  modified_base 13: mod_base = OTHER; note = 2'-O-methyluridine
  modified_base 14: mod_base = OTHER; note = 2'-O-methylguanosine
  modified_base 15: mod_base = OTHER; note = 2'-O-methyladenosine
  modified_base 16: mod_base = OTHER; note = 2'-O-methylguanosine
  modified_base 17: mod_base = OTHER; note = 2'-O-methylcytidine
  modified_base 18: mod_base = OTHER; note = 2'-O-methylguanosine
  modified_base 19: mod_base = OTHER; note = 2'-O-methylcytidine
  modified_base 20: mod_base = OTHER; note = 2'-O-methylguanosine
  modified_base 21: mod_base = OTHER; note = 2'-O-methyladenosine
tggcgtacatgctgagcgcga

SEQ ID NO: 708 - RNA, 21 nt, synthetic construct
  source 1..21: mol_type = other RNA
  modified_base 1: mod_base = OTHER; note = 2'-O-methylguanosine with phosphorothioate linkage
  modified_base 2: mod_base = OTHER; note = 2'-O-methylguanosine with phosphorothioate linkage
  modified_base 3: mod_base = OTHER; note = 2'-O-methylcytidine
  modified_base 4: mod_base = OTHER; note = 2'-O-methylguanosine
  modified_base 5: mod_base = OTHER; note = 2'-O-methyluridine
  modified_base 6: mod_base = OTHER; note = 2'-O-methyladenosine
  modified_base 7: mod_base = OTHER; note = 2'-fluorocytidine
  modified_base 8: mod_base = OTHER; note = 2'-O-methyladenosine
  modified_base 9: mod_base = OTHER; note = 2'-fluorouridine
  modified_base 10: mod_base = OTHER; note = 2'-fluoroguanosine
  modified_base 11: mod_base = OTHER; note = 2'-fluorocytidine
  modified_base 12: mod_base = OTHER; note = 2'-O-methyluridine
  modified_base 13: mod_base = OTHER; note = 2'-O-methylguanosine
  modified_base 14: mod_base = OTHER; note = 2'-O-methyladenosine
  modified_base 15: mod_base = OTHER; note = 2'-O-methylguanosine
  modified_base 16: mod_base = OTHER; note = 2'-O-methylcytidine
  modified_base 17: mod_base = OTHER; note = 2'-O-methylguanosine
  modified_base 18: mod_base = OTHER; note = 2'-O-methylcytidine
  modified_base 19: mod_base = OTHER; note = 2'-O-methylguanosine
  modified_base 20: mod_base = OTHER; note = 2'-O-methylcytidine
  modified_base 21: mod_base = OTHER; note = 2'-O-methyladenosine
ggcgtacatgctgagcgcgca

SEQ ID NO: 709 - RNA, 21 nt, synthetic construct
  source 1..21: mol_type = other RNA
  modified_base 1: mod_base = OTHER; note = 2'-O-methylguanosine with phosphorothioate linkage
  modified_base 2: mod_base = OTHER; note = 2'-O-methylcytidine with phosphorothioate linkage
  modified_base 3: mod_base = OTHER; note = 2'-O-methylguanosine
  modified_base 4: mod_base = OTHER; note = 2'-O-methyluridine
  modified_base 5: mod_base = OTHER; note = 2'-O-methyladenosine
  modified_base 6: mod_base = OTHER; note = 2'-O-methylcytidine
  modified_base 7: mod_base = OTHER; note = 2'-fluoroadenosine
  modified_base 8: mod_base = OTHER; note = 2'-O-methyluridine
  modified_base 9: mod_base = OTHER; note = 2'-fluoroguanosine
  modified_base 10: mod_base = OTHER; note = 2'-fluorocytidine
  modified_base 11: mod_base = OTHER; note = 2'-fluorouridine
  modified_base 12: mod_base = OTHER; note = 2'-O-methylguanosine
  modified_base 13: mod_base = OTHER; note = 2'-O-methyladenosine
  modified_base 14: mod_base = OTHER; note = 2'-O-methylguanosine
  modified_base 15: mod_base = OTHER; note = 2'-O-methylcytidine
  modified_base 16: mod_base = OTHER; note = 2'-O-methylguanosine
  modified_base 17: mod_base = OTHER; note = 2'-O-methylcytidine
  modified_base 18: mod_base = OTHER; note = 2'-O-methylguanosine
  modified_base 19: mod_base = OTHER; note = 2'-O-methylcytidine
  modified_base 20: mod_base = OTHER; note = 2'-O-methyladenosine
  modified_base 21: mod_base = OTHER; note = 2'-O-methyladenosine
gcgtacatgctgagcgcgcaa

SEQ ID NO: 710 - RNA, 21 nt, synthetic construct
  source 1..21: mol_type = other RNA
  modified_base 1: mod_base = OTHER; note = 2'-O-methylguanosine with phosphorothioate linkage
  modified_base 2: mod_base = OTHER; note = 2'-O-methylcytidine with phosphorothioate linkage
  modified_base 3: mod_base = OTHER; note = 2'-O-methyluridine
  modified_base 4: mod_base = OTHER; note = 2'-O-methylguanosine
  modified_base 5: mod_base = OTHER; note = 2'-O-methyladenosine
  modified_base 6: mod_base = OTHER; note = 2'-O-methylguanosine
  modified_base 7: mod_base = OTHER; note = 2'-fluorocytidine
  modified_base 8: mod_base = OTHER; note = 2'-O-methylguanosine
  modified_base 9: mod_base = OTHER; note = 2'-fluorocytidine
  modified_base 10: mod_base = OTHER; note = 2'-fluoroguanosine
  modified_base 11: mod_base = OTHER; note = 2'-fluorocytidine
  modified_base 12: mod_base = OTHER; note = 2'-O-methyladenosine
  modified_base 13: mod_base = OTHER; note = 2'-O-methylcytidine
  modified_base 14: mod_base = OTHER; note = 2'-O-methyladenosine
  modified_base 15: mod_base = OTHER; note = 2'-O-methylcytidine
  modified_base 16: mod_base = OTHER; note = 2'-O-methylguanosine
  modified_base 17: mod_base = OTHER; note = 2'-O-methyluridine
  modified_base 18: mod_base = OTHER; note = 2'-O-methyladenosine
  modified_base 19: mod_base = OTHER; note = 2'-O-methylguanosine
  modified_base 20: mod_base = OTHER; note = 2'-O-methyluridine
  modified_base 21: mod_base = OTHER; note = 2'-O-methyladenosine
gctgagcgcgcacacgtagta

SEQ ID NO: 711 - RNA, 21 nt, synthetic construct
  source 1..21: mol_type = other RNA
  modified_base 1: mod_base = OTHER; note = 2'-O-methylcytidine with phosphorothioate linkage
  modified_base 2: mod_base = OTHER; note = 2'-O-methyluridine with phosphorothioate linkage
  modified_base 3: mod_base = OTHER; note = 2'-O-methylguanosine
  modified_base 4: mod_base = OTHER; note = 2'-O-methyladenosine
  modified_base 5: mod_base = OTHER; note = 2'-O-methylguanosine
  modified_base 6: mod_base = OTHER; note = 2'-O-methylcytidine
  modified_base 7: mod_base = OTHER; note = 2'-fluoroguanosine
  modified_base 8: mod_base = OTHER; note = 2'-O-methylcytidine
  modified_base 9: mod_base = OTHER; note = 2'-fluoroguanosine
  modified_base 10: mod_base = OTHER; note = 2'-fluorocytidine
  modified_base 11: mod_base = OTHER; note = 2'-fluoroadenosine
  modified_base 12: mod_base = OTHER; note = 2'-O-methylcytidine
  modified_base 13: mod_base = OTHER; note = 2'-O-methyladenosine
  modified_base 14: mod_base = OTHER; note = 2'-O-methylcytidine
  modified_base 15: mod_base = OTHER; note = 2'-O-methylguanosine
  modified_base 16: mod_base = OTHER; note = 2'-O-methyluridine
  modified_base 17: mod_base = OTHER; note = 2'-O-methyladenosine
  modified_base 18: mod_base = OTHER; note = 2'-O-methylguanosine
  modified_base 19: mod_base = OTHER; note = 2'-O-methyluridine
  modified_base 20: mod_base = OTHER; note = 2'-O-methyladenosine
  modified_base 21: mod_base = OTHER; note = 2'-O-methyladenosine
ctgagcgcgcacacgtagtaa

SEQ ID NO: 712 - RNA, 21 nt, synthetic construct
  source 1..21: mol_type = other RNA
  modified_base 1: mod_base = OTHER; note = 2'-O-methylguanosine with phosphorothioate linkage
  modified_base 2: mod_base = OTHER; note = 2'-O-methyladenosine with phosphorothioate linkage
  modified_base 3: mod_base = OTHER; note = 2'-O-methylguanosine
  modified_base 4: mod_base = OTHER; note = 2'-O-methylcytidine
  modified_base 5: mod_base = OTHER; note = 2'-O-methylguanosine
  modified_base 6: mod_base = OTHER; note = 2'-O-methylcytidine
  modified_base 7: mod_base = OTHER; note = 2'-fluoroguanosine
  modified_base 8: mod_base = OTHER; note = 2'-O-methylcytidine
  modified_base 9: mod_base = OTHER; note = 2'-fluoroadenosine
  modified_base 10: mod_base = OTHER; note = 2'-fluorocytidine
  modified_base 11: mod_base = OTHER; note = 2'-fluoroadenosine
  modified_base 12: mod_base = OTHER; note = 2'-O-methylcytidine
  modified_base 13: mod_base = OTHER; note = 2'-O-methylguanosine
  modified_base 14: mod_base = OTHER; note = 2'-O-methyluridine
  modified_base 15: mod_base = OTHER; note = 2'-O-methyladenosine
  modified_base 16: mod_base = OTHER; note = 2'-O-methylguanosine
  modified_base 17: mod_base = OTHER; note = 2'-O-methyluridine
  modified_base 18: mod_base = OTHER; note = 2'-O-methyladenosine
  modified_base 19: mod_base = OTHER; note = 2'-O-methylcytidine
  modified_base 20: mod_base = OTHER; note = 2'-O-methyladenosine
  modified_base 21: mod_base = OTHER; note = 2'-O-methyladenosine
gagcgcgcacacgtagtacaa

SEQ ID NO: 713 - RNA, 21 nt, synthetic construct
  source 1..21: mol_type = other RNA
  modified_base 1: mod_base = OTHER; note = 2'-O-methylcytidine with phosphorothioate linkage
  modified_base 2: mod_base = OTHER; note = 2'-O-methylguanosine with phosphorothioate linkage
  modified_base 3: mod_base = OTHER; note = 2'-O-methylcytidine
  modified_base 4: mod_base = OTHER; note = 2'-O-methylguanosine
  modified_base 5: mod_base = OTHER; note = 2'-O-methylcytidine
  modified_base 6: mod_base = OTHER; note = 2'-O-methyladenosine
  modified_base 7: mod_base = OTHER; note = 2'-fluorocytidine
  modified_base 8: mod_base = OTHER; note = 2'-O-methyladenosine
  modified_base 9: mod_base = OTHER; note = 2'-fluorocytidine
  modified_base 10: mod_base = OTHER; note = 2'-fluoroguanosine
  modified_base 11: mod_base = OTHER; note = 2'-fluorouridine
  modified_base 12: mod_base = OTHER; note = 2'-O-methyladenosine
  modified_base 13: mod_base = OTHER; note = 2'-O-methylguanosine
  modified_base 14: mod_base = OTHER; note = 2'-O-methyluridine
  modified_base 15: mod_base = OTHER; note = 2'-O-methyladenosine
  modified_base 16: mod_base = OTHER; note = 2'-O-methylcytidine
  modified_base 17: mod_base = OTHER; note = 2'-O-methyladenosine
  modified_base 18: mod_base = OTHER; note = 2'-O-methylcytidine
  modified_base 19: mod_base = OTHER; note = 2'-O-methylcytidine
  modified_base 20: mod_base = OTHER; note = 2'-O-methylguanosine
  modified_base 21: mod_base = OTHER; note = 2'-O-methyladenosine
cgcgcacacgtagtacaccga

SEQ ID NO: 714 - RNA, 21 nt, synthetic construct
  source 1..21: mol_type = other RNA
  modified_base 1: mod_base = OTHER; note = 2'-O-methylguanosine with phosphorothioate linkage
  modified_base 2: mod_base = OTHER; note = 2'-O-methylcytidine with phosphorothioate linkage
  modified_base 3: mod_base = OTHER; note = 2'-O-methylguanosine
  modified_base 4: mod_base = OTHER; note = 2'-O-methylcytidine
  modified_base 5: mod_base = OTHER; note = 2'-O-methyladenosine
  modified_base 6: mod_base = OTHER; note = 2'-O-methylcytidine
  modified_base 7: mod_base = OTHER; note = 2'-fluoroadenosine
  modified_base 8: mod_base = OTHER; note = 2'-O-methylcytidine
  modified_base 9: mod_base = OTHER; note = 2'-fluoroguanosine
  modified_base 10: mod_base = OTHER; note = 2'-fluorouridine
  modified_base 11: mod_base = OTHER; note = 2'-fluoroadenosine
  modified_base 12: mod_base = OTHER; note = 2'-O-methylguanosine
  modified_base 13: mod_base = OTHER; note = 2'-O-methyluridine
  modified_base 14: mod_base = OTHER; note = 2'-O-methyladenosine
  modified_base 15: mod_base = OTHER; note = 2'-O-methylcytidine
  modified_base 16: mod_base = OTHER; note = 2'-O-methyladenosine
  modified_base 17: mod_base = OTHER; note = 2'-O-methylcytidine
  modified_base 18: mod_base = OTHER; note = 2'-O-methylcytidine
  modified_base 19: mod_base = OTHER; note = 2'-O-methylguanosine
  modified_base 20: mod_base = OTHER; note = 2'-O-methylcytidine
  modified_base 21: mod_base = OTHER; note = 2'-O-methyladenosine
gcgcacacgtagtacaccgca

SEQ ID NO: 715 - RNA, 21 nt, synthetic construct
  source 1..21: mol_type = other RNA
  modified_base 1: mod_base = OTHER; note = 2'-O-methylcytidine with phosphorothioate linkage
  modified_base 2: mod_base = OTHER; note = 2'-O-methylguanosine with phosphorothioate linkage
  modified_base 3: mod_base = OTHER; note = 2'-O-methylcytidine
  modified_base 4: mod_base = OTHER; note = 2'-O-methyladenosine
  modified_base 5: mod_base = OTHER; note = 2'-O-methylcytidine
  modified_base 6: mod_base = OTHER; note = 2'-O-methyladenosine
  modified_base 7: mod_base = OTHER; note = 2'-fluorocytidine
  modified_base 8: mod_base = OTHER; note = 2'-O-methylguanosine
  modified_base 9: mod_base = OTHER; note = 2'-fluorouridine
  modified_base 10: mod_base = OTHER; note = 2'-fluoroadenosine
  modified_base 11: mod_base = OTHER; note = 2'-fluoroguanosine
  modified_base 12: mod_base = OTHER; note = 2'-O-methyluridine
  modified_base 13: mod_base = OTHER; note = 2'-O-methyladenosine
  modified_base 14: mod_base = OTHER; note = 2'-O-methylcytidine
  modified_base 15: mod_base = OTHER; note = 2'-O-methyladenosine
  modified_base 16: mod_base = OTHER; note = 2'-O-methylcytidine
  modified_base 17: mod_base = OTHER; note = 2'-O-methylcytidine
  modified_base 18: mod_base = OTHER; note = 2'-O-methylguanosine
  modified_base 19: mod_base = OTHER; note = 2'-O-methylcytidine
  modified_base 20: mod_base = OTHER; note = 2'-O-methylcytidine
  modified_base 21: mod_base = OTHER; note = 2'-O-methyladenosine
cgcacacgtagtacaccgcca

SEQ ID NO: 716 - RNA, 21 nt, synthetic construct
  source 1..21: mol_type = other RNA
  modified_base 1: mod_base = OTHER; note = 2'-O-methylguanosine with phosphorothioate linkage
  modified_base 2: mod_base = OTHER; note = 2'-O-methylcytidine with phosphorothioate linkage
  modified_base 3: mod_base = OTHER; note = 2'-O-methyladenosine
  modified_base 4: mod_base = OTHER; note = 2'-O-methylcytidine
  modified_base 5: mod_base = OTHER; note = 2'-O-methyladenosine
  modified_base 6: mod_base = OTHER; note = 2'-O-methylcytidine
  modified_base 7: mod_base = OTHER; note = 2'-fluoroguanosine
  modified_base 8: mod_base = OTHER; note = 2'-O-methyluridine
  modified_base 9: mod_base = OTHER; note = 2'-fluoroadenosine
  modified_base 10: mod_base = OTHER; note = 2'-fluoroguanosine
  modified_base 11: mod_base = OTHER; note = 2'-fluorouridine
  modified_base 12: mod_base = OTHER; note = 2'-O-methyladenosine
  modified_base 13: mod_base = OTHER; note = 2'-O-methylcytidine
  modified_base 14: mod_base = OTHER; note = 2'-O-methyladenosine
  modified_base 15: mod_base = OTHER; note = 2'-O-methylcytidine
  modified_base 16: mod_base = OTHER; note = 2'-O-methylcytidine
  modified_base 17: mod_base = OTHER; note = 2'-O-methylguanosine
  modified_base 18: mod_base = OTHER; note = 2'-O-methylcytidine
  modified_base 19: mod_base = OTHER; note = 2'-O-methylcytidine
  modified_base 20: mod_base = OTHER; note = 2'-O-methyluridine
  modified_base 21: mod_base = OTHER; note = 2'-O-methyladenosine
gcacacgtagtacaccgccta

SEQ ID NO: 717 - RNA, 21 nt, synthetic construct
  source 1..21: mol_type = other RNA
  modified_base 1: mod_base = OTHER; note = 2'-O-methylcytidine with phosphorothioate linkage
  modified_base 2: mod_base = OTHER; note = 2'-O-methyladenosine with phosphorothioate linkage
  modified_base 3: mod_base = OTHER; note = 2'-O-methylcytidine
  modified_base 4: mod_base = OTHER; note = 2'-O-methyladenosine
  modified_base 5: mod_base = OTHER; note = 2'-O-methylcytidine
  modified_base 6: mod_base = OTHER; note = 2'-O-methylguanosine
  modified_base 7: mod_base = OTHER; note = 2'-fluorouridine
  modified_base 8: mod_base = OTHER; note = 2'-O-methyladenosine
  modified_base 9: mod_base = OTHER; note = 2'-fluoroguanosine
  modified_base 10: mod_base = OTHER; note = 2'-fluorouridine
  modified_base 11: mod_base = OTHER; note = 2'-fluoroadenosine
  modified_base 12: mod_base = OTHER; note = 2'-O-methylcytidine
  modified_base 13: mod_base = OTHER; note = 2'-O-methyladenosine
  modified_base 14: mod_base = OTHER; note = 2'-O-methylcytidine
  modified_base 15: mod_base = OTHER; note = 2'-O-methylcytidine
  modified_base 16: mod_base = OTHER; note = 2'-O-methylguanosine
  modified_base 17: mod_base = OTHER; note = 2'-O-methylcytidine
  modified_base 18: mod_base = OTHER; note = 2'-O-methylcytidine
  modified_base 19: mod_base = OTHER; note = 2'-O-methyluridine
  modified_base 20: mod_base = OTHER; note = 2'-O-methyluridine
  modified_base 21: mod_base = OTHER; note = 2'-O-methyladenosine
cacacgtagtacaccgcctta

SEQ ID NO: 718 - RNA, 21 nt, synthetic construct
  source 1..21: mol_type = other RNA
  modified_base 1: mod_base = OTHER; note = 2'-O-methyladenosine with phosphorothioate linkage
  modified_base 2: mod_base = OTHER; note = 2'-O-methylcytidine with phosphorothioate linkage
  modified_base 3: mod_base = OTHER; note = 2'-O-methyladenosine
  modified_base 4: mod_base = OTHER; note = 2'-O-methylcytidine
  modified_base 5: mod_base = OTHER; note = 2'-O-methylguanosine
  modified_base 6: mod_base = OTHER; note = 2'-O-methyluridine
  modified_base 7: mod_base = OTHER; note = 2'-fluoroadenosine
  modified_base 8: mod_base = OTHER; note = 2'-O-methylguanosine
  modified_base 9: mod_base = OTHER; note = 2'-fluorouridine
  modified_base 10: mod_base = OTHER; note = 2'-fluoroadenosine
  modified_base 11: mod_base = OTHER; note = 2'-fluorocytidine
  modified_base 12: mod_base = OTHER; note = 2'-O-methyladenosine
  modified_base 13: mod_base = OTHER; note = 2'-O-methylcytidine
  modified_base 14: mod_base = OTHER; note = 2'-O-methylcytidine
  modified_base 15: mod_base = OTHER; note = 2'-O-methylguanosine
  modified_base 16: mod_base = OTHER; note = 2'-O-methylcytidine
  modified_base 17: mod_base = OTHER; note = 2'-O-methylcytidine
  modified_base 18: mod_base = OTHER; note = 2'-O-methyluridine
  modified_base 19: mod_base = OTHER; note = 2'-O-methyluridine
  modified_base 20: mod_base = OTHER; note = 2'-O-methylguanosine
  modified_base 21: mod_base = OTHER; note = 2'-O-methyladenosine
acacgtagtacaccgccttga

SEQ ID NO: 719 - RNA, 21 nt, synthetic construct
  source 1..21: mol_type = other RNA
  modified_base 1: mod_base = OTHER; note = 2'-O-methyladenosine with phosphorothioate linkage
  modified_base 2: mod_base = OTHER; note = 2'-O-methylcytidine with phosphorothioate linkage
  modified_base 3: mod_base = OTHER; note = 2'-O-methylguanosine
  modified_base 4: mod_base = OTHER; note = 2'-O-methyluridine
  modified_base 5: mod_base = OTHER; note = 2'-O-methyladenosine
  modified_base 6: mod_base = OTHER; note = 2'-O-methylguanosine
  modified_base 7: mod_base = OTHER; note = 2'-fluorouridine
  modified_base 8: mod_base = OTHER; note = 2'-O-methyladenosine
  modified_base 9: mod_base = OTHER; note = 2'-fluorocytidine
  modified_base 10: mod_base = OTHER; note = 2'-fluoroadenosine
  modified_base 11: mod_base = OTHER; note = 2'-fluorocytidine
  modified_base 12: mod_base = OTHER; note = 2'-O-methylcytidine
  modified_base 13: mod_base = OTHER; note = 2'-O-methylguanosine
  modified_base 14: mod_base = OTHER; note = 2'-O-methylcytidine
  modified_base 15: mod_base = OTHER; note = 2'-O-methylcytidine
  modified_base 16: mod_base = OTHER; note = 2'-O-methyluridine
  modified_base 17: mod_base = OTHER; note = 2'-O-methyluridine
  modified_base 18: mod_base = OTHER; note = 2'-O-methylguanosine
  modified_base 19: mod_base = OTHER; note = 2'-O-methylcytidine
  modified_base 20: mod_base = OTHER; note = 2'-O-methyladenosine
  modified_base 21: mod_base = OTHER; note = 2'-O-methyladenosine
acgtagtacaccgccttgcaa

SEQ ID NO: 720 - RNA, 21 nt, synthetic construct
  source 1..21: mol_type = other RNA
  modified_base 1: mod_base = OTHER; note = 2'-O-methylcytidine with phosphorothioate linkage
  modified_base 2: mod_base = OTHER; note = 2'-O-methylguanosine with phosphorothioate linkage
  modified_base 3: mod_base = OTHER; note = 2'-O-methyluridine
  modified_base 4: mod_base = OTHER; note = 2'-O-methyladenosine
  modified_base 5: mod_base = OTHER; note = 2'-O-methylguanosine
  modified_base 6: mod_base = OTHER; note = 2'-O-methyluridine
  modified_base 7: mod_base = OTHER; note = 2'-fluoroadenosine
  modified_base 8: mod_base = OTHER; note = 2'-O-methylcytidine
  modified_base 9: mod_base = OTHER; note = 2'-fluoroadenosine
  modified_base 10: mod_base = OTHER; note = 2'-fluorocytidine
  modified_base 11: mod_base = OTHER; note = 2'-fluorocytidine
  modified_base 12: mod_base = OTHER; note = 2'-O-methylguanosine
  modified_base 13: mod_base = OTHER; note = 2'-O-methylcytidine
  modified_base 14: mod_base = OTHER; note = 2'-O-methylcytidine
  modified_base 15: mod_base = OTHER; note = 2'-O-methyluridine
  modified_base 16: mod_base = OTHER; note = 2'-O-methyluridine
  modified_base 17: mod_base = OTHER; note = 2'-O-methylguanosine
  modified_base 18: mod_base = OTHER; note = 2'-O-methylcytidine
  modified_base 19: mod_base = OTHER; note = 2'-O-methyladenosine
  modified_base 20: mod_base = OTHER; note = 2'-O-methylguanosine
  modified_base 21: mod_base = OTHER; note = 2'-O-methyladenosine
cgtagtacaccgccttgcaga

SEQ ID NO: 721 - RNA, 21 nt, synthetic construct
  source 1..21: mol_type = other RNA
  modified_base 1: mod_base = OTHER; note = 2'-O-methylguanosine with phosphorothioate linkage
  modified_base 2: mod_base = OTHER; note = 2'-O-methyluridine with phosphorothioate linkage
  modified_base 3: mod_base = OTHER; note = 2'-O-methyladenosine
  modified_base 4: mod_base = OTHER; note = 2'-O-methylguanosine
  modified_base 5: mod_base = OTHER; note = 2'-O-methyluridine
  modified_base 6: mod_base = OTHER; note = 2'-O-methyladenosine
  modified_base 7: mod_base = OTHER; note = 2'-fluorocytidine
  modified_base 8: mod_base = OTHER; note = 2'-O-methyladenosine
  modified_base 9: mod_base = OTHER; note = 2'-fluorocytidine
  modified_base 10: mod_base = OTHER; note = 2'-fluorocytidine
  modified_base 11: mod_base = OTHER; note = 2'-fluoroguanosine
  modified_base 12: mod_base = OTHER; note = 2'-O-methylcytidine
  modified_base 13: mod_base = OTHER; note = 2'-O-methylcytidine
  modified_base 14: mod_base = OTHER; note = 2'-O-methyluridine
  modified_base 15: mod_base = OTHER; note = 2'-O-methyluridine
  modified_base 16: mod_base = OTHER; note = 2'-O-methylguanosine
  modified_base 17: mod_base = OTHER; note = 2'-O-methylcytidine
  modified_base 18: mod_base = OTHER; note = 2'-O-methyladenosine
  modified_base 19: mod_base = OTHER; note = 2'-O-methylguanosine
  modified_base 20: mod_base = OTHER; note = 2'-O-methylcytidine
  modified_base 21: mod_base = OTHER; note = 2'-O-methyladenosine
gtagtacaccgccttgcagca

SEQ ID NO: 722 - RNA, 21 nt, synthetic construct
  source 1..21: mol_type = other RNA
  modified_base 1: mod_base = OTHER; note = 2'-O-methylguanosine with phosphorothioate linkage
  modified_base 2: mod_base = OTHER; note = 2'-O-methylcytidine with phosphorothioate linkage
  modified_base 3: mod_base = OTHER; note = 2'-O-methylcytidine
  modified_base 4: mod_base = OTHER; note = 2'-O-methyluridine
  modified_base 5: mod_base = OTHER; note = 2'-O-methylguanosine
  modified_base 6: mod_base = OTHER; note = 2'-O-methylcytidine
  modified_base 7: mod_base = OTHER; note = 2'-fluorocytidine
  modified_base 8: mod_base = OTHER; note = 2'-O-methylguanosine
  modified_base 9: mod_base = OTHER; note = 2'-fluoroguanosine
  modified_base 10: mod_base = OTHER; note = 2'-fluoroguanosine
  modified_base 11: mod_base = OTHER; note = 2'-fluorouridine
  modified_base 12: mod_base = OTHER; note = 2'-O-methylcytidine
  modified_base 13: mod_base = OTHER; note = 2'-O-methyladenosine
  modified_base 14: mod_base = OTHER; note = 2'-O-methylguanosine
  modified_base 15: mod_base = OTHER; note = 2'-O-methylguanosine
  modified_base 16: mod_base = OTHER; note = 2'-O-methyladenosine
  modified_base 17: mod_base = OTHER; note = 2'-O-methyladenosine
  modified_base 18: mod_base = OTHER; note = 2'-O-methylguanosine
  modified_base 19: mod_base = OTHER; note = 2'-O-methylguanosine
  modified_base 20: mod_base = OTHER; note = 2'-O-methylcytidine
  modified_base 21: mod_base = OTHER; note = 2'-O-methyladenosine
gcctgccgggtcaggaaggca

SEQ ID NO: 723 - RNA, 21 nt, synthetic construct
  source 1..21: mol_type = other RNA
  modified_base 1: mod_base = OTHER; note = 2'-O-methylcytidine with phosphorothioate linkage
  modified_base 2: mod_base = OTHER; note = 2'-O-methyladenosine with phosphorothioate linkage
  modified_base 3: mod_base = OTHER; note = 2'-O-methylguanosine
  modified_base 4: mod_base = OTHER; note = 2'-O-methylguanosine
  modified_base 5: mod_base = OTHER; note = 2'-O-methyladenosine
  modified_base 6: mod_base = OTHER; note = 2'-O-methyladenosine
  modified_base 7: mod_base = OTHER; note = 2'-fluoroguanosine
  modified_base 8: mod_base = OTHER; note = 2'-O-methylguanosine
  modified_base 9: mod_base = OTHER; note = 2'-fluorocytidine
  modified_base 10: mod_base = OTHER; note = 2'-fluorocytidine
  modified_base 11: mod_base = OTHER; note = 2'-fluoroadenosine
  modified_base 12: mod_base = OTHER; note = 2'-O-methylcytidine
  modified_base 13: mod_base = OTHER; note = 2'-O-methyladenosine
  modified_base 14: mod_base = OTHER; note = 2'-O-methyladenosine
  modified_base 15: mod_base = OTHER; note = 2'-O-methyladenosine
  modified_base 16: mod_base = OTHER; note = 2'-O-methylguanosine
  modified_base 17: mod_base = OTHER; note = 2'-O-methyladenosine
  modified_base 18: mod_base = OTHER; note = 2'-O-methylguanosine
  modified_base 19: mod_base = OTHER; note = 2'-O-methylcytidine
  modified_base 20: mod_base = OTHER; note = 2'-O-methylguanosine
  modified_base 21: mod_base = OTHER; note = 2'-O-methyladenosine
caggaaggccacaaagagcga

SEQ ID NO: 724 - RNA, 21 nt, synthetic construct
  source 1..21: mol_type = other RNA
  modified_base 1: mod_base = OTHER; note = 2'-O-methylguanosine with phosphorothioate linkage
  modified_base 2: mod_base = OTHER; note = 2'-O-methylguanosine with phosphorothioate linkage
  modified_base 3: mod_base = OTHER; note = 2'-O-methyladenosine
  modified_base 4: mod_base = OTHER; note = 2'-O-methyladenosine
  modified_base 5: mod_base = OTHER; note = 2'-O-methylguanosine
  modified_base 6: mod_base = OTHER; note = 2'-O-methylguanosine
  modified_base 7: mod_base = OTHER; note = 2'-fluorocytidine
  modified_base 8: mod_base = OTHER; note = 2'-O-methylcytidine
  modified_base 9: mod_base = OTHER; note = 2'-fluoroadenosine
  modified_base 10: mod_base = OTHER; note = 2'-fluorocytidine
  modified_base 11: mod_base = OTHER; note = 2'-fluoroadenosine
  modified_base 12: mod_base = OTHER; note = 2'-O-methyladenosine
  modified_base 13: mod_base = OTHER; note = 2'-O-methyladenosine
  modified_base 14: mod_base = OTHER; note = 2'-O-methylguanosine
  modified_base 15: mod_base = OTHER; note = 2'-O-methyladenosine
  modified_base 16: mod_base = OTHER; note = 2'-O-methylguanosine
  modified_base 17: mod_base = OTHER; note = 2'-O-methylcytidine
  modified_base 18: mod_base = OTHER; note = 2'-O-methylguanosine
  modified_base 19: mod_base = OTHER; note = 2'-O-methylguanosine
  modified_base 20: mod_base = OTHER; note = 2'-O-methylcytidine
  modified_base 21: mod_base = OTHER; note = 2'-O-methyladenosine
ggaaggccacaaagagcggca

SEQ ID NO: 725 - RNA, 21 nt, synthetic construct
  source 1..21: mol_type = other RNA
  modified_base 1: mod_base = OTHER; note = 2'-O-methylguanosine with phosphorothioate linkage
  modified_base 2: mod_base = OTHER; note = 2'-O-methyladenosine with phosphorothioate linkage
  modified_base 3: mod_base = OTHER; note = 2'-O-methyladenosine
  modified_base 4: mod_base = OTHER; note = 2'-O-methylguanosine
  modified_base 5: mod_base = OTHER; note = 2'-O-methylguanosine
  modified_base 6: mod_base = OTHER; note = 2'-O-methylcytidine
  modified_base 7: mod_base = OTHER; note = 2'-fluorocytidine
  modified_base 8: mod_base = OTHER; note = 2'-O-methyladenosine
  modified_base 9: mod_base = OTHER; note = 2'-fluorocytidine
  modified_base 10: mod_base = OTHER; note = 2'-fluoroadenosine
  modified_base 11: mod_base = OTHER; note = 2'-fluoroadenosine
  modified_base 12: mod_base = OTHER; note = 2'-O-methyladenosine
  modified_base 13: mod_base = OTHER; note = 2'-O-methylguanosine
  modified_base 14: mod_base = OTHER; note = 2'-O-methyladenosine
  modified_base 15: mod_base = OTHER; note = 2'-O-methylguanosine
  modified_base 16: mod_base = OTHER; note = 2'-O-methylcytidine
  modified_base 17: mod_base = OTHER; note = 2'-O-methylguanosine
  modified_base 18: mod_base = OTHER; note = 2'-O-methylguanosine
  modified_base 19: mod_base = OTHER; note = 2'-O-methylcytidine
  modified_base 20: mod_base = OTHER; note = 2'-O-methylguanosine
  modified_base 21: mod_base = OTHER; note = 2'-O-methyladenosine
gaaggccacaaagagcggcga

SEQ ID NO: 726 - RNA, 21 nt, synthetic construct
  source 1..21: mol_type = other RNA
  modified_base 1: mod_base = OTHER; note = 2'-O-methyladenosine with phosphorothioate linkage
  modified_base 2: mod_base = OTHER; note = 2'-O-methyladenosine with phosphorothioate linkage
  modified_base 3: mod_base = OTHER; note = 2'-O-methylguanosine
  modified_base 4: mod_base = OTHER; note = 2'-O-methylguanosine
  modified_base 5: mod_base = OTHER; note = 2'-O-methylcytidine
  modified_base 6: mod_base = OTHER; note = 2'-O-methylcytidine
  modified_base 7: mod_base = OTHER; note = 2'-fluoroadenosine
  modified_base 8: mod_base = OTHER; note = 2'-O-methylcytidine
  modified_base 9: mod_base = OTHER; note = 2'-fluoroadenosine
  modified_base 10: mod_base = OTHER; note = 2'-fluoroadenosine
  modified_base 11: mod_base = OTHER; note = 2'-fluoroadenosine
  modified_base 12: mod_base = OTHER; note = 2'-O-methylguanosine
  modified_base 13: mod_base = OTHER; note = 2'-O-methyladenosine
  modified_base 14: mod_base = OTHER; note = 2'-O-methylguanosine
  modified_base 15: mod_base = OTHER; note = 2'-O-methylcytidine
  modified_base 16: mod_base = OTHER; note = 2'-O-methylguanosine
  modified_base 17: mod_base = OTHER; note = 2'-O-methylguanosine
  modified_base 18: mod_base = OTHER; note = 2'-O-methylcytidine
  modified_base 19: mod_base = OTHER; note = 2'-O-methylguanosine
  modified_base 20: mod_base = OTHER; note = 2'-O-methyluridine
  modified_base 21: mod_base = OTHER; note = 2'-O-methyladenosine
aaggccacaaagagcggcgta

SEQ ID NO: 727 - RNA, 21 nt, synthetic construct
  source 1..21: mol_type = other RNA
  modified_base 1: mod_base = OTHER; note = 2'-O-methyladenosine with phosphorothioate linkage
  modified_base 2: mod_base = OTHER; note = 2'-O-methylguanosine with phosphorothioate linkage
  modified_base 3: mod_base = OTHER; note = 2'-O-methylguanosine
  modified_base 4: mod_base = OTHER; note = 2'-O-methylcytidine
  modified_base 5: mod_base = OTHER; note = 2'-O-methylcytidine
  modified_base 6: mod_base = OTHER; note = 2'-O-methyladenosine
  modified_base 7: mod_base = OTHER; note = 2'-fluorocytidine
  modified_base 8: mod_base = OTHER; note = 2'-O-methyladenosine
  modified_base 9: mod_base = OTHER; note = 2'-fluoroadenosine
  modified_base 10: mod_base = OTHER; note = 2'-fluoroadenosine
  modified_base 11: mod_base = OTHER; note = 2'-fluoroguanosine
  modified_base 12: mod_base = OTHER; note = 2'-O-methyladenosine
  modified_base 13: mod_base = OTHER; note = 2'-O-methylguanosine
  modified_base 14: mod_base = OTHER; note = 2'-O-methylcytidine
  modified_base 15: mod_base = OTHER; note = 2'-O-methylguanosine
  modified_base 16: mod_base = OTHER; note = 2'-O-methylguanosine
  modified_base 17: mod_base = OTHER; note = 2'-O-methylcytidine
  modified_base 18: mod_base = OTHER; note = 2'-O-methylguanosine
  modified_base 19: mod_base = OTHER; note = 2'-O-methyluridine
  modified_base 20: mod_base = OTHER; note = 2'-O-methylguanosine
  modified_base 21: mod_base = OTHER; note = 2'-O-methyladenosine
aggccacaaagagcggcgtga

SEQ ID NO: 728 - RNA, 21 nt, synthetic construct
  source 1..21: mol_type = other RNA
  modified_base 1: mod_base = OTHER; note = 2'-O-methylguanosine with phosphorothioate linkage
  modified_base 2: mod_base = OTHER; note = 2'-O-methylguanosine with phosphorothioate linkage
  modified_base 3: mod_base = OTHER; note = 2'-O-methylcytidine
  modified_base 4: mod_base = OTHER; note = 2'-O-methylcytidine
  modified_base 5: mod_base = OTHER; note = 2'-O-methyladenosine
  modified_base 6: mod_base = OTHER; note = 2'-O-methylcytidine
  modified_base 7: mod_base = OTHER; note = 2'-fluoroadenosine
  modified_base 8: mod_base = OTHER; note = 2'-O-methyladenosine
  modified_base 9: mod_base = OTHER; note = 2'-fluoroadenosine
  modified_base 10: mod_base = OTHER; note = 2'-fluoroguanosine
  modified_base 11: mod_base = OTHER; note = 2'-fluoroadenosine
  modified_base 12: mod_base = OTHER; note = 2'-O-methylguanosine
  modified_base 13: mod_base = OTHER; note = 2'-O-methylcytidine
  modified_base 14: mod_base = OTHER; note = 2'-O-methylguanosine
  modified_base 15: mod_base = OTHER; note = 2'-O-methylguanosine
  modified_base 16: mod_base = OTHER; note = 2'-O-methylcytidine
  modified_base 17: mod_base = OTHER; note = 2'-O-methylguanosine
  modified_base 18: mod_base = OTHER; note = 2'-O-methyluridine
  modified_base 19: mod_base = OTHER; note = 2'-O-methylguanosine
  modified_base 20: mod_base = OTHER; note = 2'-O-methyladenosine
  modified_base 21: mod_base = OTHER; note = 2'-O-methyladenosine
ggccacaaagagcggcgtgaa

SEQ ID NO: 729 - RNA, 21 nt, synthetic construct
  source 1..21: mol_type = other RNA
  modified_base 1: mod_base = OTHER; note = 2'-O-methylcytidine with phosphorothioate linkage
  modified_base 2: mod_base = OTHER; note = 2'-O-methylcytidine with phosphorothioate linkage
  modified_base 3: mod_base = OTHER; note = 2'-O-methyladenosine
  modified_base 4: mod_base = OTHER; note = 2'-O-methylcytidine
  modified_base 5: mod_base = OTHER; note = 2'-O-methyladenosine
  modified_base 6: mod_base = OTHER; note = 2'-O-methyladenosine
  modified_base 7: mod_base = OTHER; note = 2'-fluoroadenosine
  modified_base 8: mod_base = OTHER; note = 2'-O-methylguanosine
  modified_base 9: mod_base = OTHER; note = 2'-fluoroadenosine
  modified_base 10: mod_base = OTHER; note = 2'-fluoroguanosine
  modified_base 11: mod_base = OTHER; note = 2'-fluorocytidine
  modified_base 12: mod_base = OTHER; note = 2'-O-methylguanosine
  modified_base 13: mod_base = OTHER; note = 2'-O-methylguanosine
  modified_base 14: mod_base = OTHER; note = 2'-O-methylcytidine
  modified_base 15: mod_base = OTHER; note = 2'-O-methylguanosine
  modified_base 16: mod_base = OTHER; note = 2'-O-methyluridine
  modified_base 17: mod_base = OTHER; note = 2'-O-methylguanosine
  modified_base 18: mod_base = OTHER; note = 2'-O-methyladenosine
  modified_base 19: mod_base = OTHER; note = 2'-O-methylguanosine
  modified_base 20: mod_base = OTHER; note = 2'-O-methylcytidine
  modified_base 21: mod_base = OTHER; note = 2'-O-methyladenosine
ccacaaagagcggcgtgagca

SEQ ID NO: 730 - RNA, 21 nt, synthetic construct
  source 1..21: mol_type = other RNA
  modified_base 1: mod_base = OTHER; note = 2'-O-methylcytidine with phosphorothioate linkage
  modified_base 2: mod_base = OTHER; note = 2'-O-methyladenosine with phosphorothioate linkage
  modified_base 3: mod_base = OTHER; note = 2'-O-methylcytidine
  modified_base 4: mod_base = OTHER; note = 2'-O-methyladenosine
  modified_base 5: mod_base = OTHER; note = 2'-O-methyladenosine
  modified_base 6: mod_base = OTHER; note = 2'-O-methyladenosine
  modified_base 7: mod_base = OTHER; note = 2'-fluoroguanosine
  modified_base 8: mod_base = OTHER; note = 2'-O-methyladenosine
  modified_base 9: mod_base = OTHER; note = 2'-fluoroguanosine
  modified_base 10: mod_base = OTHER; note = 2'-fluorocytidine
  modified_base 11: mod_base = OTHER; note = 2'-fluoroguanosine
  modified_base 12: mod_base = OTHER; note = 2'-O-methylguanosine
  modified_base 13: mod_base = OTHER; note = 2'-O-methylcytidine
  modified_base 14: mod_base = OTHER; note = 2'-O-methylguanosine
  modified_base 15: mod_base = OTHER; note = 2'-O-methyluridine
  modified_base 16: mod_base = OTHER; note = 2'-O-methylguanosine
  modified_base 17: mod_base = OTHER; note = 2'-O-methyladenosine
  modified_base 18: mod_base = OTHER; note = 2'-O-methylguanosine
  modified_base 19: mod_base = OTHER; note = 2'-O-methylcytidine
  modified_base 20: mod_base = OTHER; note = 2'-O-methyladenosine
  modified_base 21: mod_base = OTHER; note = 2'-O-methyladenosine
cacaaagagcggcgtgagcaa

SEQ ID NO: 731 - RNA, 21 nt, synthetic construct
  source 1..21: mol_type = other RNA
  modified_base 1: mod_base = OTHER; note = 2'-O-methyladenosine with phosphorothioate linkage
  modified_base 2: mod_base = OTHER; note = 2'-O-methylguanosine with phosphorothioate linkage
  modified_base 3: mod_base = OTHER; note = 2'-O-methylcytidine
  modified_base 4: mod_base = OTHER; note = 2'-O-methyladenosine
  modified_base 5: mod_base = OTHER; note = 2'-O-methylcytidine
  modified_base 6: mod_base = OTHER; note = 2'-O-methylcytidine
  modified_base 7: mod_base = OTHER; note = 2'-fluoroguanosine
  modified_base 8: mod_base = OTHER; note = 2'-O-methylcytidine
  modified_base 9: mod_base = OTHER; note = 2'-fluoroguanosine
  modified_base 10: mod_base = OTHER; note = 2'-fluorocytidine
  modified_base 11: mod_base = OTHER; note = 2'-fluorocytidine
  modified_base 12: mod_base = OTHER; note = 2'-O-methylguanosine
  modified_base 13: mod_base = OTHER; note = 2'-O-methyluridine
  modified_base 14: mod_base = OTHER; note = 2'-O-methylcytidine
  modified_base 15: mod_base = OTHER; note = 2'-O-methylguanosine
  modified_base 16: mod_base = OTHER; note = 2'-O-methylguanosine
  modified_base 17: mod_base = OTHER; note = 2'-O-methylcytidine
  modified_base 18: mod_base = OTHER; note = 2'-O-methylcytidine
  modified_base 19: mod_base = OTHER; note = 2'-O-methyladenosine
  modified_base 20: mod_base = OTHER; note = 2'-O-methylguanosine
  modified_base 21: mod_base = OTHER; note = 2'-O-methyladenosine
agcaccgcgccgtcggccaga

SEQ ID NO: 732 - RNA, 21 nt, synthetic construct
  source 1..21: mol_type = other RNA
  modified_base 1: mod_base = OTHER; note = 2'-O-methylcytidine with phosphorothioate linkage
  modified_base 2: mod_base = OTHER; note = 2'-O-methylguanosine with phosphorothioate linkage
  modified_base 3: mod_base = OTHER; note = 2'-O-methylcytidine
  modified_base 4: mod_base = OTHER; note = 2'-O-methylguanosine
  modified_base 5: mod_base = OTHER; note = 2'-O-methylcytidine
  modified_base 6: mod_base = OTHER; note = 2'-O-methylcytidine
  modified_base 7: mod_base = OTHER; note = 2'-fluoroguanosine
  modified_base 8: mod_base = OTHER; note = 2'-O-methyluridine
  modified_base 9: mod_base = OTHER; note = 2'-fluorocytidine
  modified_base 10: mod_base = OTHER; note = 2'-fluoroguanosine
  modified_base 11: mod_base = OTHER; note = 2'-fluoroguanosine
  modified_base 12: mod_base = OTHER; note = 2'-O-methylcytidine
  modified_base 13: mod_base = OTHER; note = 2'-O-methylcytidine
  modified_base 14: mod_base = OTHER; note = 2'-O-methyladenosine
  modified_base 15: mod_base = OTHER; note = 2'-O-methylguanosine
  modified_base 16: mod_base = OTHER; note = 2'-O-methylcytidine
  modified_base 17: mod_base = OTHER; note = 2'-O-methylguanosine
  modified_base 18: mod_base = OTHER; note = 2'-O-methylcytidine
  modified_base 19: mod_base = OTHER; note = 2'-O-methylcytidine
  modified_base 20: mod_base = OTHER; note = 2'-O-methyladenosine
  modified_base 21: mod_base = OTHER; note = 2'-O-methyladenosine
cgcgccgtcggccagcgccaa

SEQ ID NO: 733 - RNA, 21 nt, synthetic construct
  source 1..21: mol_type = other RNA
  modified_base 1: mod_base = OTHER; note = 2'-O-methylguanosine with phosphorothioate linkage
  modified_base 2: mod_base = OTHER; note = 2'-O-methylcytidine with phosphorothioate linkage
  modified_base 3: mod_base = OTHER; note = 2'-O-methylguanosine
  modified_base 4: mod_base = OTHER; note = 2'-O-methylcytidine
  modified_base 5: mod_base = OTHER; note = 2'-O-methylcytidine
  modified_base 6: mod_base = OTHER; note = 2'-O-methylguanosine
  modified_base 7: mod_base = OTHER; note = 2'-fluorouridine
  modified_base 8: mod_base = OTHER; note = 2'-O-methylcytidine
  modified_base 9: mod_base = OTHER; note = 2'-fluoroguanosine
  modified_base 10: mod_base = OTHER; note = 2'-fluoroguanosine
  modified_base 11: mod_base = OTHER; note = 2'-fluorocytidine
  modified_base 12: mod_base = OTHER; note = 2'-O-methylcytidine
  modified_base 13: mod_base = OTHER; note = 2'-O-methyladenosine
  modified_base 14: mod_base = OTHER; note = 2'-O-methylguanosine
  modified_base 15: mod_base = OTHER; note = 2'-O-methylcytidine
  modified_base 16: mod_base = OTHER; note = 2'-O-methylguanosine
  modified_base 17: mod_base = OTHER; note = 2'-O-methylcytidine
  modified_base 18: mod_base = OTHER; note = 2'-O-methylcytidine
  modified_base 19: mod_base = OTHER; note = 2'-O-methyladenosine
  modified_base 20: mod_base = OTHER; note = 2'-O-methylguanosine
  modified_base 21: mod_base = OTHER; note = 2'-O-methyladenosine
gcgccgtcggccagcgccaga

SEQ ID NO: 734 - RNA, 21 nt, synthetic construct
  source 1..21: mol_type = other RNA
  modified_base 1: mod_base = OTHER; note = 2'-O-methylcytidine with phosphorothioate linkage
  modified_base 2: mod_base = OTHER; note = 2'-O-methyladenosine with phosphorothioate linkage
  modified_base 3: mod_base = OTHER; note = 2'-O-methylguanosine
  modified_base 4: mod_base = OTHER; note = 2'-O-methylcytidine
  modified_base 5: mod_base = OTHER; note = 2'-O-methyladenosine
  modified_base 6: mod_base = OTHER; note = 2'-O-methylcytidine
  modified_base 7: mod_base = OTHER; note = 2'-fluoroadenosine
  modified_base 8: mod_base = OTHER; note = 2'-O-methyladenosine
  modified_base 9: mod_base = OTHER; note = 2'-fluoroguanosine
  modified_base 10: mod_base = OTHER; note = 2'-fluorocytidine
  modified_base 11: mod_base = OTHER; note = 2'-fluoroguanosine
  modified_base 12: mod_base = OTHER; note = 2'-O-methyluridine
  modified_base 13: mod_base = OTHER; note = 2'-O-methylguanosine
  modified_base 14: mod_base = OTHER; note = 2'-O-methylguanosine
  modified_base 15: mod_base = OTHER; note = 2'-O-methylcytidine
  modified_base 16: mod_base = OTHER; note = 2'-O-methylcytidine
  modified_base 17: mod_base = OTHER; note = 2'-O-methylguanosine
  modified_base 18: mod_base = OTHER; note = 2'-O-methylcytidine
  modified_base 19: mod_base = OTHER; note = 2'-O-methylcytidine
  modified_base 20: mod_base = OTHER; note = 2'-O-methyladenosine
  modified_base 21: mod_base = OTHER; note = 2'-O-methyladenosine
cagcacaagcgtggccgccaa

SEQ ID NO: 735 - RNA, 21 nt, synthetic construct
  source 1..21: mol_type = other RNA
  modified_base 1: mod_base = OTHER; note = 2'-O-methyladenosine with phosphorothioate linkage
  modified_base 2: mod_base = OTHER; note = 2'-O-methylguanosine with phosphorothioate linkage
  modified_base 3: mod_base = OTHER; note = 2'-O-methylcytidine
  modified_base 4: mod_base = OTHER; note = 2'-O-methyladenosine
  modified_base 5: mod_base = OTHER; note = 2'-O-methylcytidine
  modified_base 6: mod_base = OTHER; note = 2'-O-methyladenosine
  modified_base 7: mod_base = OTHER; note = 2'-fluoroadenosine
  modified_base 8: mod_base = OTHER; note = 2'-O-methylguanosine
  modified_base 9: mod_base = OTHER; note = 2'-fluorocytidine
  modified_base 10: mod_base = OTHER; note = 2'-fluoroguanosine
  modified_base 11: mod_base = OTHER; note = 2'-fluorouridine
  modified_base 12: mod_base = OTHER; note = 2'-O-methylguanosine
  modified_base 13: mod_base = OTHER; note = 2'-O-methylguanosine
  modified_base 14: mod_base = OTHER; note = 2'-O-methylcytidine
  modified_base 15: mod_base = OTHER; note = 2'-O-methylcytidine
  modified_base 16: mod_base = OTHER; note = 2'-O-methylguanosine
  modified_base 17: mod_base = OTHER; note = 2'-O-methylcytidine
  modified_base 18: mod_base = OTHER; note = 2'-O-methylcytidine
  modified_base 19: mod_base = OTHER; note = 2'-O-methyladenosine
  modified_base 20: mod_base = OTHER; note = 2'-O-methylguanosine
  modified_base 21: mod_base = OTHER; note = 2'-O-methyladenosine
agcacaagcgtggccgccaga

SEQ ID NO: 736 - RNA, 21 nt, synthetic construct
  source 1..21: mol_type = other RNA
  modified_base 1: mod_base = OTHER; note = 2'-O-methylguanosine with phosphorothioate linkage
  modified_base 2: mod_base = OTHER; note = 2'-O-methylcytidine with phosphorothioate linkage
  modified_base 3: mod_base = OTHER; note = 2'-O-methyladenosine
  modified_base 4: mod_base = OTHER; note = 2'-O-methylcytidine
  modified_base 5: mod_base = OTHER; note = 2'-O-methyladenosine
  modified_base 6: mod_base = OTHER; note = 2'-O-methyladenosine
  modified_base 7: mod_base = OTHER; note = 2'-fluoroguanosine
  modified_base 8: mod_base = OTHER; note = 2'-O-methylcytidine
  modified_base 9: mod_base = OTHER; note = 2'-fluoroguanosine
  modified_base 10: mod_base = OTHER; note = 2'-fluorouridine
  modified_base 11: mod_base = OTHER; note = 2'-fluoroguanosine
  modified_base 12: mod_base = OTHER; note = 2'-O-methylguanosine
  modified_base 13: mod_base = OTHER; note = 2'-O-methylcytidine
  modified_base 14: mod_base = OTHER; note = 2'-O-methylcytidine
  modified_base 15: mod_base = OTHER; note = 2'-O-methylguanosine
  modified_base 16: mod_base = OTHER; note = 2'-O-methylcytidine
  modified_base 17: mod_base = OTHER; note = 2'-O-methylcytidine
  modified_base 18: mod_base = OTHER; note = 2'-O-methyladenosine
  modified_base 19: mod_base = OTHER; note = 2'-O-methylguanosine
  modified_base 20: mod_base = OTHER; note = 2'-O-methylcytidine
  modified_base 21: mod_base = OTHER; note = 2'-O-methyladenosine
gcacaagcgtggccgccagca

SEQ ID NO: 737 - RNA, 21 nt, synthetic construct
  source 1..21: mol_type = other RNA
  modified_base 1: mod_base = OTHER; note = 2'-O-methylcytidine with phosphorothioate linkage
  modified_base 2: mod_base = OTHER; note = 2'-O-methyladenosine with phosphorothioate linkage
  modified_base 3: mod_base = OTHER; note = 2'-O-methyladenosine
  modified_base 4: mod_base = OTHER; note = 2'-O-methylguanosine
  modified_base 5: mod_base = OTHER; note = 2'-O-methylcytidine
  modified_base 6: mod_base = OTHER; note = 2'-O-methylguanosine
  modified_base 7: mod_base = OTHER; note = 2'-fluorouridine
  modified_base 8: mod_base = OTHER; note = 2'-O-methylguanosine
  modified_base 9: mod_base = OTHER; note = 2'-fluoroguanosine
  modified_base 10: mod_base = OTHER; note = 2'-fluorocytidine
  modified_base 11: mod_base = OTHER; note = 2'-fluorocytidine
  modified_base 12: mod_base = OTHER; note = 2'-O-methylguanosine
  modified_base 13: mod_base = OTHER; note = 2'-O-methylcytidine
  modified_base 14: mod_base = OTHER; note = 2'-O-methylcytidine
  modified_base 15: mod_base = OTHER; note = 2'-O-methyladenosine
  modified_base 16: mod_base = OTHER; note = 2'-O-methylguanosine
  modified_base 17: mod_base = OTHER; note = 2'-O-methylcytidine
  modified_base 18: mod_base = OTHER; note = 2'-O-methylguanosine
  modified_base 19: mod_base = OTHER; note = 2'-O-methylguanosine
  modified_base 20: mod_base = OTHER; note = 2'-O-methyluridine
  modified_base 21: mod_base = OTHER; note = 2'-O-methyladenosine
caagcgtggccgccagcggta

SEQ ID NO: 738 - RNA, 21 nt, synthetic construct
  source 1..21: mol_type = other RNA
  modified_base 1: mod_base = OTHER; note = 2'-O-methyladenosine with phosphorothioate linkage
  modified_base 2: mod_base = OTHER; note = 2'-O-methyladenosine with phosphorothioate linkage
  modified_base 3: mod_base = OTHER; note = 2'-O-methylguanosine
  modified_base 4: mod_base = OTHER; note = 2'-O-methylcytidine
  modified_base 5: mod_base = OTHER; note = 2'-O-methylguanosine
  modified_base 6: mod_base = OTHER; note = 2'-O-methyluridine
  modified_base 7: mod_base = OTHER; note = 2'-fluoroguanosine
  modified_base 8: mod_base = OTHER; note = 2'-O-methylguanosine
  modified_base 9: mod_base = OTHER; note = 2'-fluorocytidine
  modified_base 10: mod_base = OTHER; note = 2'-fluorocytidine
  modified_base 11: mod_base = OTHER; note = 2'-fluoroguanosine
  modified_base 12: mod_base = OTHER; note = 2'-O-methylcytidine
  modified_base 13: mod_base = OTHER; note = 2'-O-methylcytidine
  modified_base 14: mod_base = OTHER; note = 2'-O-methyladenosine
  modified_base 15: mod_base = OTHER; note = 2'-O-methylguanosine
  modified_base 16: mod_base = OTHER; note = 2'-O-methylcytidine
  modified_base 17: mod_base = OTHER; note = 2'-O-methylguanosine
  modified_base 18: mod_base = OTHER; note = 2'-O-methylguanosine
  modified_base 19: mod_base = OTHER; note = 2'-O-methyluridine
  modified_base 20: mod_base = OTHER; note = 2'-O-methylcytidine
  modified_base 21: mod_base = OTHER; note = 2'-O-methyladenosine
aagcgtggccgccagcggtca

SEQ ID NO: 739 - RNA, 21 nt, synthetic construct
  source 1..21: mol_type = other RNA
  modified_base 1: mod_base = OTHER; note = 2'-O-methyladenosine with phosphorothioate linkage
  modified_base 2: mod_base = OTHER; note = 2'-O-methylguanosine with phosphorothioate linkage
  modified_base 3: mod_base = OTHER; note = 2'-O-methylcytidine
  modified_base 4: mod_base = OTHER; note = 2'-O-methylguanosine
  modified_base 5: mod_base = OTHER; note = 2'-O-methyluridine
  modified_base 6: mod_base = OTHER; note = 2'-O-methylguanosine
  modified_base 7: mod_base = OTHER; note = 2'-fluoroguanosine
  modified_base 8: mod_base = OTHER; note = 2'-O-methylcytidine
  modified_base 9: mod_base = OTHER; note = 2'-fluorocytidine
  modified_base 10: mod_base = OTHER; note = 2'-fluoroguanosine
  modified_base 11: mod_base = OTHER; note = 2'-fluorocytidine
  modified_base 12: mod_base = OTHER; note = 2'-O-methylcytidine
  modified_base 13: mod_base = OTHER; note = 2'-O-methyladenosine
  modified_base 14: mod_base = OTHER; note = 2'-O-methylguanosine
  modified_base 15: mod_base = OTHER; note = 2'-O-methylcytidine
  modified_base 16: mod_base = OTHER; note = 2'-O-methylguanosine
  modified_base 17: mod_base = OTHER; note = 2'-O-methylguanosine
  modified_base 18: mod_base = OTHER; note = 2'-O-methyluridine
  modified_base 19: mod_base = OTHER; note = 2'-O-methylcytidine
  modified_base 20: mod_base = OTHER; note = 2'-O-methylguanosine
  modified_base 21: mod_base = OTHER; note = 2'-O-methyladenosine
agcgtggccgccagcggtcga

SEQ ID NO: 740 - RNA, 21 nt, synthetic construct
  source 1..21: mol_type = other RNA
  modified_base 1: mod_base = OTHER; note = 2'-O-methylguanosine with phosphorothioate linkage
  modified_base 2: mod_base = OTHER; note = 2'-O-methylcytidine with phosphorothioate linkage
  modified_base 3: mod_base = OTHER; note = 2'-O-methylguanosine
  modified_base 4: mod_base = OTHER; note = 2'-O-methyluridine
  modified_base 5: mod_base = OTHER; note = 2'-O-methylguanosine
  modified_base 6: mod_base = OTHER; note = 2'-O-methylguanosine
  modified_base 7: mod_base = OTHER; note = 2'-fluorocytidine
  modified_base 8: mod_base = OTHER; note = 2'-O-methylcytidine
  modified_base 9: mod_base = OTHER; note = 2'-fluoroguanosine
  modified_base 10: mod_base = OTHER; note = 2'-fluorocytidine
  modified_base 11: mod_base = OTHER; note = 2'-fluorocytidine
  modified_base 12: mod_base = OTHER; note = 2'-O-methyladenosine
  modified_base 13: mod_base = OTHER; note = 2'-O-methylguanosine
  modified_base 14: mod_base = OTHER; note = 2'-O-methylcytidine
  modified_base 15: mod_base = OTHER; note = 2'-O-methylguanosine
  modified_base 16: mod_base = OTHER; note = 2'-O-methylguanosine
  modified_base 17: mod_base = OTHER; note = 2'-O-methyluridine
  modified_base 18: mod_base = OTHER; note = 2'-O-methylcytidine
  modified_base 19: mod_base = OTHER; note = 2'-O-methylguanosine
  modified_base 20: mod_base = OTHER; note = 2'-O-methylcytidine
  modified_base 21: mod_base = OTHER; note = 2'-O-methyladenosine
gcgtggccgccagcggtcgca

SEQ ID NO: 741 - RNA, 21 nt, synthetic construct
  source 1..21: mol_type = other RNA
  modified_base 1: mod_base = OTHER; note = 2'-O-methylguanosine with phosphorothioate linkage
  modified_base 2: mod_base = OTHER; note = 2'-O-methylguanosine with phosphorothioate linkage
  modified_base 3: mod_base = OTHER; note = 2'-O-methylcytidine
  modified_base 4: mod_base = OTHER; note = 2'-O-methyluridine
  modified_base 5: mod_base = OTHER; note = 2'-O-methylguanosine
  modified_base 6: mod_base = OTHER; note = 2'-O-methyluridine
  modified_base 7: mod_base = OTHER; note = 2'-fluoroguanosine
  modified_base 8: mod_base = OTHER; note = 2'-O-methylcytidine
  modified_base 9: mod_base = OTHER; note = 2'-fluorocytidine
  modified_base 10: mod_base = OTHER; note = 2'-fluorouridine
  modified_base 11: mod_base = OTHER; note = 2'-fluoroguanosine
  modified_base 12: mod_base = OTHER; note = 2'-O-methyluridine
  modified_base 13: mod_base = OTHER; note = 2'-O-methylguanosine
  modified_base 14: mod_base = OTHER; note = 2'-O-methylguanosine
  modified_base 15: mod_base = OTHER; note = 2'-O-methylcytidine
  modified_base 16: mod_base = OTHER; note = 2'-O-methylcytidine
  modified_base 17: mod_base = OTHER; note = 2'-O-methylcytidine
  modified_base 18: mod_base = OTHER; note = 2'-O-methylguanosine
  modified_base 19: mod_base = OTHER; note = 2'-O-methylcytidine
  modified_base 20: mod_base = OTHER; note = 2'-O-methylguanosine
  modified_base 21: mod_base = OTHER; note = 2'-O-methyladenosine
ggctgtgcctgtggcccgcga

SEQ ID NO: 742 - RNA, 21 nt, synthetic construct
  source 1..21: mol_type = other RNA
  modified_base 1: mod_base = OTHER; note = 2'-O-methylguanosine with phosphorothioate linkage
  modified_base 2: mod_base = OTHER; note = 2'-O-methylcytidine with phosphorothioate linkage
  modified_base 3: mod_base = OTHER; note = 2'-O-methylcytidine
  modified_base 4: mod_base = OTHER; note = 2'-O-methyluridine
  modified_base 5: mod_base = OTHER; note = 2'-O-methylguanosine
  modified_base 6: mod_base = OTHER; note = 2'-O-methyluridine
  modified_base 7: mod_base = OTHER; note = 2'-fluoroguanosine
  modified_base 8: mod_base = OTHER; note = 2'-O-methylguanosine
  modified_base 9: mod_base = OTHER; note = 2'-fluorocytidine
  modified_base 10: mod_base = OTHER; note = 2'-fluorocytidine
  modified_base 11: mod_base = OTHER; note = 2'-fluorocytidine
  modified_base 12: mod_base = OTHER; note = 2'-O-methylguanosine
  modified_base 13: mod_base = OTHER; note = 2'-O-methylcytidine
  modified_base 14: mod_base = OTHER; note = 2'-O-methylguanosine
  modified_base 15: mod_base = OTHER; note = 2'-O-methyladenosine
  modified_base 16: mod_base = OTHER; note = 2'-O-methyladenosine
  modified_base 17: mod_base = OTHER; note = 2'-O-methylguanosine
  modified_base 18: mod_base = OTHER; note = 2'-O-methyluridine
  modified_base 19: mod_base = OTHER; note = 2'-O-methylcytidine
  modified_base 20: mod_base = OTHER; note = 2'-O-methyluridine
  modified_base 21: mod_base = OTHER; note = 2'-O-methyladenosine
gcctgtggcccgcgaagtcta

SEQ ID NO: 743 - RNA, 21 nt, synthetic construct
  source 1..21: mol_type = other RNA
  modified_base 1: mod_base = OTHER; note = 2'-O-methylcytidine with phosphorothioate linkage
  modified_base 2: mod_base = OTHER; note = 2'-O-methyluridine with phosphorothioate linkage
  modified_base 3: mod_base = OTHER; note = 2'-O-methylguanosine
  modified_base 4: mod_base = OTHER; note = 2'-O-methyluridine
  modified_base 5: mod_base = OTHER; note = 2'-O-methylguanosine
  modified_base 6: mod_base = OTHER; note = 2'-O-methylguanosine
  modified_base 7: mod_base = OTHER; note = 2'-fluorocytidine
  modified_base 8: mod_base = OTHER; note = 2'-O-methylcytidine
  modified_base 9: mod_base = OTHER; note = 2'-fluorocytidine
  modified_base 10: mod_base = OTHER; note = 2'-fluoroguanosine
  modified_base 11: mod_base = OTHER; note = 2'-fluorocytidine
  modified_base 12: mod_base = OTHER; note = 2'-O-methylguanosine
  modified_base 13: mod_base = OTHER; note = 2'-O-methyladenosine
  modified_base 14: mod_base = OTHER; note = 2'-O-methyladenosine
  modified_base 15: mod_base = OTHER; note = 2'-O-methylguanosine
  modified_base 16: mod_base = OTHER; note = 2'-O-methyluridine
  modified_base 17: mod_base = OTHER; note = 2'-O-methylcytidine
  modified_base 18: mod_base = OTHER; note = 2'-O-methyluridine
  modified_base 19: mod_base = OTHER; note = 2'-O-methyluridine
  modified_base 20: mod_base = OTHER; note = 2'-O-methylcytidine
  modified_base 21: mod_base = OTHER; note = 2'-O-methyladenosine
ctgtggcccgcgaagtcttca

SEQ ID NO: 744 - RNA, 21 nt, synthetic construct
  source 1..21: mol_type = other RNA
  modified_base 1: mod_base = OTHER; note = 2'-O-methylguanosine with phosphorothioate linkage
  modified_base 2: mod_base = OTHER; note = 2'-O-methylcytidine with phosphorothioate linkage
  modified_base 3: mod_base = OTHER; note = 2'-O-methylcytidine
  modified_base 4: mod_base = OTHER; note = 2'-O-methylcytidine
  modified_base 5: mod_base = OTHER; note = 2'-O-methylguanosine
  modified_base 6: mod_base = OTHER; note = 2'-O-methylcytidine
  modified_base 7: mod_base = OTHER; note = 2'-fluoroguanosine
  modified_base 8: mod_base = OTHER; note = 2'-O-methyladenosine
  modified_base 9: mod_base = OTHER; note = 2'-fluoroadenosine
  modified_base 10: mod_base = OTHER; note = 2'-fluoroguanosine
  modified_base 11: mod_base = OTHER; note = 2'-fluorouridine
  modified_base 12: mod_base = OTHER; note = 2'-O-methylcytidine
  modified_base 13: mod_base = OTHER; note = 2'-O-methyluridine
  modified_base 14: mod_base = OTHER; note = 2'-O-methyluridine
  modified_base 15: mod_base = OTHER; note = 2'-O-methylcytidine
  modified_base 16: mod_base = OTHER; note = 2'-O-methylcytidine
  modified_base 17: mod_base = OTHER; note = 2'-O-methyladenosine
  modified_base 18: mod_base = OTHER; note = 2'-O-methylguanosine
  modified_base 19: mod_base = OTHER; note = 2'-O-methylcytidine
  modified_base 20: mod_base = OTHER; note = 2'-O-methyluridine
  modified_base 21: mod_base = OTHER; note = 2'-O-methyladenosine
gcccgcgaagtcttccagcta

SEQ ID NO: 745 - RNA, 21 nt, synthetic construct
  source 1..21: mol_type = other RNA
  modified_base 1: mod_base = OTHER; note = 2'-O-methylcytidine with phosphorothioate linkage
  modified_base 2: mod_base = OTHER; note = 2'-O-methylcytidine with phosphorothioate linkage
  modified_base 3: mod_base = OTHER; note = 2'-O-methylcytidine
  modified_base 4: mod_base = OTHER; note = 2'-O-methylguanosine
  modified_base 5: mod_base = OTHER; note = 2'-O-methylcytidine
  modified_base 6: mod_base = OTHER; note = 2'-O-methylguanosine
  modified_base 7: mod_base = OTHER; note = 2'-fluoroadenosine
  modified_base 8: mod_base = OTHER; note = 2'-O-methyladenosine
  modified_base 9: mod_base = OTHER; note = 2'-fluoroguanosine
  modified_base 10: mod_base = OTHER; note = 2'-fluorouridine
  modified_base 11: mod_base = OTHER; note = 2'-fluorocytidine
  modified_base 12: mod_base = OTHER; note = 2'-O-methyluridine
  modified_base 13: mod_base = OTHER; note = 2'-O-methyluridine
  modified_base 14: mod_base = OTHER; note = 2'-O-methylcytidine
  modified_base 15: mod_base = OTHER; note = 2'-O-methylcytidine
  modified_base 16: mod_base = OTHER; note = 2'-O-methyladenosine
  modified_base 17: mod_base = OTHER; note = 2'-O-methylguanosine
  modified_base 18: mod_base = OTHER; note = 2'-O-methylcytidine
  modified_base 19: mod_base = OTHER; note = 2'-O-methyluridine
  modified_base 20: mod_base = OTHER; note = 2'-O-methylcytidine
  modified_base 21: mod_base = OTHER; note = 2'-O-methyladenosine
cccgcgaagtcttccagctca

SEQ ID NO: 746 - RNA, 21 nt, synthetic construct
  source 1..21: mol_type = other RNA
  modified_base 1: mod_base = OTHER; note = 2'-O-methylcytidine with phosphorothioate linkage
  modified_base 2: mod_base = OTHER; note = 2'-O-methylcytidine with phosphorothioate linkage
  modified_base 3: mod_base = OTHER; note = 2'-O-methylguanosine
  modified_base 4: mod_base = OTHER; note = 2'-O-methylcytidine
  modified_base 5: mod_base = OTHER; note = 2'-O-methylguanosine
  modified_base 6: mod_base = OTHER; note = 2'-O-methyladenosine
  modified_base 7: mod_base = OTHER; note = 2'-fluoroadenosine
  modified_base 8: mod_base = OTHER; note = 2'-O-methylguanosine
  modified_base 9: mod_base = OTHER; note = 2'-fluorouridine
  modified_base 10: mod_base = OTHER; note = 2'-fluorocytidine
  modified_base 11: mod_base = OTHER; note = 2'-fluorouridine
  modified_base 12: mod_base = OTHER; note = 2'-O-methyluridine
  modified_base 13: mod_base = OTHER; note = 2'-O-methylcytidine
  modified_base 14: mod_base = OTHER; note = 2'-O-methylcytidine
  modified_base 15: mod_base = OTHER; note = 2'-O-methyladenosine
  modified_base 16: mod_base = OTHER; note = 2'-O-methylguanosine
  modified_base 17: mod_base = OTHER; note = 2'-O-methylcytidine
  modified_base 18: mod_base = OTHER; note = 2'-O-methyluridine
  modified_base 19: mod_base = OTHER; note = 2'-O-methylcytidine
  modified_base 20: mod_base = OTHER; note = 2'-O-methyladenosine
  modified_base 21: mod_base = OTHER; note = 2'-O-methyladenosine
ccgcgaagtcttccagctcaa

SEQ ID NO: 747 - RNA, 21 nt, synthetic construct
  source 1..21: mol_type = other RNA
  modified_base 1: mod_base = OTHER; note = 2'-O-methyluridine with phosphorothioate linkage
  modified_base 2: mod_base = OTHER; note = 2'-O-methylcytidine with phosphorothioate linkage
  modified_base 3: mod_base = OTHER; note = 2'-O-methylcytidine
  modified_base 4: mod_base = OTHER; note = 2'-O-methyladenosine
  modified_base 5: mod_base = OTHER; note = 2'-O-methylguanosine
  modified_base 6: mod_base = OTHER; note = 2'-O-methylcytidine
  modified_base 7: mod_base = OTHER; note = 2'-fluorouridine
  modified_base 8: mod_base = OTHER; note = 2'-O-methylcytidine
  modified_base 9: mod_base = OTHER; note = 2'-fluoroadenosine
  modified_base 10: mod_base = OTHER; note = 2'-fluoroguanosine
  modified_base 11: mod_base = OTHER; note = 2'-fluorocytidine
  modified_base 12: mod_base = OTHER; note = 2'-O-methyladenosine
  modified_base 13: mod_base = OTHER; note = 2'-O-methylguanosine
  modified_base 14: mod_base = OTHER; note = 2'-O-methyluridine
  modified_base 15: mod_base = OTHER; note = 2'-O-methylguanosine
  modified_base 16: mod_base = OTHER; note = 2'-O-methyluridine
  modified_base 17: mod_base = OTHER; note = 2'-O-methylcytidine
  modified_base 18: mod_base = OTHER; note = 2'-O-methyluridine
  modified_base 19: mod_base = OTHER; note = 2'-O-methylcytidine
  modified_base 20: mod_base = OTHER; note = 2'-O-methylguanosine
  modified_base 21: mod_base = OTHER; note = 2'-O-methyladenosine
tccagctcagcagtgtctcga

SEQ ID NO: 748 - RNA, 21 nt, synthetic construct
  source 1..21: mol_type = other RNA
  modified_base 1: mod_base = OTHER; note = 2'-O-methylcytidine with phosphorothioate linkage
  modified_base 2: mod_base = OTHER; note = 2'-O-methyladenosine with phosphorothioate linkage
  modified_base 3: mod_base = OTHER; note = 2'-O-methylguanosine
  modified_base 4: mod_base = OTHER; note = 2'-O-methylcytidine
  modified_base 5: mod_base = OTHER; note = 2'-O-methyluridine
  modified_base 6: mod_base = OTHER; note = 2'-O-methylcytidine
  modified_base 7: mod_base = OTHER; note = 2'-fluoroadenosine
  modified_base 8: mod_base = OTHER; note = 2'-O-methylguanosine
  modified_base 9: mod_base = OTHER; note = 2'-fluorocytidine
  modified_base 10: mod_base = OTHER; note = 2'-fluoroadenosine
  modified_base 11: mod_base = OTHER; note = 2'-fluoroguanosine
  modified_base 12: mod_base = OTHER; note = 2'-O-methyluridine
  modified_base 13: mod_base = OTHER; note = 2'-O-methylguanosine
  modified_base 14: mod_base = OTHER; note = 2'-O-methyluridine
  modified_base 15: mod_base = OTHER; note = 2'-O-methylcytidine
  modified_base 16: mod_base = OTHER; note = 2'-O-methyluridine
  modified_base 17: mod_base = OTHER; note = 2'-O-methylcytidine
  modified_base 18: mod_base = OTHER; note = 2'-O-methylguanosine
  modified_base 19: mod_base = OTHER; note = 2'-O-methyluridine
  modified_base 20: mod_base = OTHER; note = 2'-O-methyluridine
  modified_base 21: mod_base = OTHER; note = 2'-O-methyladenosine
cagctcagcagtgtctcgtta

SEQ ID NO: 749 - RNA, 21 nt, synthetic construct
  source 1..21: mol_type = other RNA
  modified_base 1: mod_base = OTHER; note = 2'-O-methylguanosine with phosphorothioate linkage
  modified_base 2: mod_base = OTHER; note = 2'-O-methylcytidine with phosphorothioate linkage
  modified_base 3: mod_base = OTHER; note = 2'-O-methylguanosine
  modified_base 4: mod_base = OTHER; note = 2'-O-methylcytidine
  modified_base 5: mod_base = OTHER; note = 2'-O-methyladenosine
  modified_base 6: mod_base = OTHER; note = 2'-O-methylcytidine
  modified_base 7: mod_base = OTHER; note = 2'-fluorocytidine
  modified_base 8: mod_base = OTHER; note = 2'-O-methyladenosine
  modified_base 9: mod_base = OTHER; note = 2'-fluoroguanosine
  modified_base 10: mod_base = OTHER; note = 2'-fluoroadenosine
  modified_base 11: mod_base = OTHER; note = 2'-fluoroadenosine
  modified_base 12: mod_base = OTHER; note = 2'-O-methylguanosine
  modified_base 13: mod_base = OTHER; note = 2'-O-methylcytidine
  modified_base 14: mod_base = OTHER; note = 2'-O-methyluridine
  modified_base 15: mod_base = OTHER; note = 2'-O-methyladenosine
  modified_base 16: mod_base = OTHER; note = 2'-O-methyladenosine
  modified_base 17: mod_base = OTHER; note = 2'-O-methyladenosine
  modified_base 18: mod_base = OTHER; note = 2'-O-methylguanosine
  modified_base 19: mod_base = OTHER; note = 2'-O-methyluridine
  modified_base 20: mod_base = OTHER; note = 2'-O-methylcytidine
  modified_base 21: mod_base = OTHER; note = 2'-O-methyladenosine
gcgcaccagaagctaaagtca

SEQ ID NO: 750 - RNA, 21 nt, synthetic construct
  source 1..21: mol_type = other RNA
  modified_base 1: mod_base = OTHER; note = 2'-O-methylcytidine with phosphorothioate linkage
  modified_base 2: mod_base = OTHER; note = 2'-O-methyladenosine with phosphorothioate linkage
  modified_base 3: mod_base = OTHER; note = 2'-O-methylguanosine
  modified_base 4: mod_base = OTHER; note = 2'-O-methyladenosine
  modified_base 5: mod_base = OTHER; note = 2'-O-methyladenosine
  modified_base 6: mod_base = OTHER; note = 2'-O-methylguanosine
  modified_base 7: mod_base = OTHER; note = 2'-fluorocytidine
  modified_base 8: mod_base = OTHER; note = 2'-O-methyluridine
  modified_base 9: mod_base = OTHER; note = 2'-fluoroadenosine
  modified_base 10: mod_base = OTHER; note = 2'-fluoroadenosine
  modified_base 11: mod_base = OTHER; note = 2'-fluoroadenosine
  modified_base 12: mod_base = OTHER; note = 2'-O-methylguanosine
  modified_base 13: mod_base = OTHER; note = 2'-O-methyluridine
  modified_base 14: mod_base = OTHER; note = 2'-O-methylcytidine
  modified_base 15: mod_base = OTHER; note = 2'-O-methyluridine
  modified_base 16: mod_base = OTHER; note = 2'-O-methyluridine
  modified_base 17: mod_base = OTHER; note = 2'-O-methylguanosine
  modified_base 18: mod_base = OTHER; note = 2'-O-methyladenosine
  modified_base 19: mod_base = OTHER; note = 2'-O-methyluridine
  modified_base 20: mod_base = OTHER; note = 2'-O-methylguanosine
  modified_base 21: mod_base = OTHER; note = 2'-O-methyladenosine
cagaagctaaagtcttgatga

SEQ ID NO: 751 - RNA, 21 nt, synthetic construct
  source 1..21: mol_type = other RNA
  modified_base 1: mod_base = OTHER; note = 2'-O-methyladenosine with phosphorothioate linkage
  modified_base 2: mod_base = OTHER; note = 2'-O-methylguanosine with phosphorothioate linkage
  modified_base 3: mod_base = OTHER; note = 2'-O-methyladenosine
  modified_base 4: mod_base = OTHER; note = 2'-O-methyladenosine
  modified_base 5: mod_base = OTHER; note = 2'-O-methylguanosine
  modified_base 6: mod_base = OTHER; note = 2'-O-methylcytidine
  modified_base 7: mod_base = OTHER; note = 2'-fluorouridine
  modified_base 8: mod_base = OTHER; note = 2'-O-methyladenosine
  modified_base 9: mod_base = OTHER; note = 2'-fluoroadenosine
  modified_base 10: mod_base = OTHER; note = 2'-fluoroadenosine
  modified_base 11: mod_base = OTHER; note = 2'-fluoroguanosine
  modified_base 12: mod_base = OTHER; note = 2'-O-methyluridine
  modified_base 13: mod_base = OTHER; note = 2'-O-methylcytidine
  modified_base 14: mod_base = OTHER; note = 2'-O-methyluridine
  modified_base 15: mod_base = OTHER; note = 2'-O-methyluridine
  modified_base 16: mod_base = OTHER; note = 2'-O-methylguanosine
  modified_base 17: mod_base = OTHER; note = 2'-O-methyladenosine
  modified_base 18: mod_base = OTHER; note = 2'-O-methyluridine
  modified_base 19: mod_base = OTHER; note = 2'-O-methylguanosine
  modified_base 20: mod_base = OTHER; note = 2'-O-methylcytidine
  modified_base 21: mod_base = OTHER; note = 2'-O-methyladenosine
agaagctaaagtcttgatgca

SEQ ID NO: 752 - RNA, 21 nt, synthetic construct
  source 1..21: mol_type = other RNA
  modified_base 1: mod_base = OTHER; note = 2'-O-methylguanosine with phosphorothioate linkage
  modified_base 2: mod_base = OTHER; note = 2'-O-methyladenosine with phosphorothioate linkage
  modified_base 3: mod_base = OTHER; note = 2'-O-methyladenosine
  modified_base 4: mod_base = OTHER; note = 2'-O-methylguanosine
  modified_base 5: mod_base = OTHER; note = 2'-O-methylcytidine
  modified_base 6: mod_base = OTHER; note = 2'-O-methyluridine
  modified_base 7: mod_base = OTHER; note = 2'-fluoroadenosine
  modified_base 8: mod_base = OTHER; note = 2'-O-methyladenosine
  modified_base 9: mod_base = OTHER; note = 2'-fluoroadenosine
  modified_base 10: mod_base = OTHER; note = 2'-fluoroguanosine
  modified_base 11: mod_base = OTHER; note = 2'-fluorouridine
  modified_base 12: mod_base = OTHER; note = 2'-O-methylcytidine
  modified_base 13: mod_base = OTHER; note = 2'-O-methyluridine
  modified_base 14: mod_base = OTHER; note = 2'-O-methyluridine
  modified_base 15: mod_base = OTHER; note = 2'-O-methylguanosine
  modified_base 16: mod_base = OTHER; note = 2'-O-methyladenosine
  modified_base 17: mod_base = OTHER; note = 2'-O-methyluridine
  modified_base 18: mod_base = OTHER; note = 2'-O-methylguanosine
  modified_base 19: mod_base = OTHER; note = 2'-O-methylcytidine
  modified_base 20: mod_base = OTHER; note = 2'-O-methylcytidine
  modified_base 21: mod_base = OTHER; note = 2'-O-methyladenosine
gaagctaaagtcttgatgcca

SEQ ID NO: 753 - RNA, 21 nt, synthetic construct
  source 1..21: mol_type = other RNA
  modified_base 1: mod_base = OTHER; note = 2'-O-methyladenosine with phosphorothioate linkage
  modified_base 2: mod_base = OTHER; note = 2'-O-methyladenosine with phosphorothioate linkage
  modified_base 3: mod_base = OTHER; note = 2'-O-methylguanosine
  modified_base 4: mod_base = OTHER; note = 2'-O-methylcytidine
  modified_base 5: mod_base = OTHER; note = 2'-O-methyluridine
  modified_base 6: mod_base = OTHER; note = 2'-O-methyladenosine
  modified_base 7: mod_base = OTHER; note = 2'-fluoroadenosine
  modified_base 8: mod_base = OTHER; note = 2'-O-methyladenosine
  modified_base 9: mod_base = OTHER; note = 2'-fluoroguanosine
  modified_base 10: mod_base = OTHER; note = 2'-fluorouridine
  modified_base 11: mod_base = OTHER; note = 2'-fluorocytidine
  modified_base 12: mod_base = OTHER; note = 2'-O-methyluridine
  modified_base 13: mod_base = OTHER; note = 2'-O-methyluridine
  modified_base 14: mod_base = OTHER; note = 2'-O-methylguanosine
  modified_base 15: mod_base = OTHER; note = 2'-O-methyladenosine
  modified_base 16: mod_base = OTHER; note = 2'-O-methyluridine
  modified_base 17: mod_base = OTHER; note = 2'-O-methylguanosine
  modified_base 18: mod_base = OTHER; note = 2'-O-methylcytidine
  modified_base 19: mod_base = OTHER; note = 2'-O-methylcytidine
  modified_base 20: mod_base = OTHER; note = 2'-O-methyladenosine
  modified_base 21: mod_base = OTHER; note = 2'-O-methyladenosine
aagctaaagtcttgatgccaa

SEQ ID NO: 754 - RNA, 21 nt, synthetic construct
  source 1..21: mol_type = other RNA
  modified_base 1: mod_base = OTHER; note = 2'-O-methylguanosine with phosphorothioate linkage
  modified_base 2: mod_base = OTHER; note = 2'-O-methylcytidine with phosphorothioate linkage
  modified_base 3: mod_base = OTHER; note = 2'-O-methyluridine
  modified_base 4: mod_base = OTHER; note = 2'-O-methyladenosine
  modified_base 5: mod_base = OTHER; note = 2'-O-methyladenosine
  modified_base 6: mod_base = OTHER; note = 2'-O-methyladenosine
  modified_base 7: mod_base = OTHER; note = 2'-fluoroguanosine
  modified_base 8: mod_base = OTHER; note = 2'-O-methyluridine
  modified_base 9: mod_base = OTHER; note = 2'-fluorocytidine
  modified_base 10: mod_base = OTHER; note = 2'-fluorouridine
  modified_base 11: mod_base = OTHER; note = 2'-fluorouridine
  modified_base 12: mod_base = OTHER; note = 2'-O-methylguanosine
  modified_base 13: mod_base = OTHER; note = 2'-O-methyladenosine
  modified_base 14: mod_base = OTHER; note = 2'-O-methyluridine
  modified_base 15: mod_base = OTHER; note = 2'-O-methylguanosine
  modified_base 16: mod_base = OTHER; note = 2'-O-methylcytidine
  modified_base 17: mod_base = OTHER; note = 2'-O-methylcytidine
  modified_base 18: mod_base = OTHER; note = 2'-O-methyladenosine
  modified_base 19: mod_base = OTHER; note = 2'-O-methyluridine
  modified_base 20: mod_base = OTHER; note = 2'-O-methylcytidine
  modified_base 21: mod_base = OTHER; note = 2'-O-methyladenosine
gctaaagtcttgatgccatca

SEQ ID NO: 755 - RNA, 21 nt, synthetic construct
  source 1..21: mol_type = other RNA
  modified_base 1: mod_base = OTHER; note = 2'-O-methylguanosine with phosphorothioate linkage
  modified_base 2: mod_base = OTHER; note = 2'-O-methyladenosine with phosphorothioate linkage
  modified_base 3: mod_base = OTHER; note = 2'-O-methyluridine
  modified_base 4: mod_base = OTHER; note = 2'-O-methylguanosine
  modified_base 5: mod_base = OTHER; note = 2'-O-methylcytidine
  modified_base 6: mod_base = OTHER; note = 2'-O-methylcytidine
  modified_base 7: mod_base = OTHER; note = 2'-fluoroadenosine
  modified_base 8: mod_base = OTHER; note = 2'-O-methyluridine
  modified_base 9: mod_base = OTHER; note = 2'-fluorocytidine
  modified_base 10: mod_base = OTHER; note = 2'-fluoroadenosine
  modified_base 11: mod_base = OTHER; note = 2'-fluoroadenosine
  modified_base 12: mod_base = OTHER; note = 2'-O-methyladenosine
  modified_base 13: mod_base = OTHER; note = 2'-O-methylguanosine
  modified_base 14: mod_base = OTHER; note = 2'-O-methylguanosine
  modified_base 15: mod_base = OTHER; note = 2'-O-methyladenosine
  modified_base 16: mod_base = OTHER; note = 2'-O-methylcytidine
  modified_base 17: mod_base = OTHER; note = 2'-O-methyladenosine
  modified_base 18: mod_base = OTHER; note = 2'-O-methyluridine
  modified_base 19: mod_base = OTHER; note = 2'-O-methylcytidine
  modified_base 20: mod_base = OTHER; note = 2'-O-methylcytidine
  modified_base 21: mod_base = OTHER; note = 2'-O-methyladenosine
gatgccatcaaaggacatcca

SEQ ID NO: 756 - RNA, 21 nt, synthetic construct
  source 1..21: mol_type = other RNA
  modified_base 1: mod_base = OTHER; note = 2'-O-methyladenosine with phosphorothioate linkage
  modified_base 2: mod_base = OTHER; note = 2'-O-methyluridine with phosphorothioate linkage
  modified_base 3: mod_base = OTHER; note = 2'-O-methylguanosine
  modified_base 4: mod_base = OTHER; note = 2'-O-methylcytidine
  modified_base 5: mod_base = OTHER; note = 2'-O-methylcytidine
  modified_base 6: mod_base = OTHER; note = 2'-O-methyladenosine
  modified_base 7: mod_base = OTHER; note = 2'-fluorouridine
  modified_base 8: mod_base = OTHER; note = 2'-O-methylcytidine
  modified_base 9: mod_base = OTHER; note = 2'-fluoroadenosine
  modified_base 10: mod_base = OTHER; note = 2'-fluoroadenosine
  modified_base 11: mod_base = OTHER; note = 2'-fluoroadenosine
  modified_base 12: mod_base = OTHER; note = 2'-O-methylguanosine
  modified_base 13: mod_base = OTHER; note = 2'-O-methylguanosine
  modified_base 14: mod_base = OTHER; note = 2'-O-methyladenosine
  modified_base 15: mod_base = OTHER; note = 2'-O-methylcytidine
  modified_base 16: mod_base = OTHER; note = 2'-O-methyladenosine
  modified_base 17: mod_base = OTHER; note = 2'-O-methyluridine
  modified_base 18: mod_base = OTHER; note = 2'-O-methylcytidine
  modified_base 19: mod_base = OTHER; note = 2'-O-methylcytidine
  modified_base 20: mod_base = OTHER; note = 2'-O-methylcytidine
  modified_base 21: mod_base = OTHER; note = 2'-O-methyladenosine
atgccatcaaaggacatccca

SEQ ID NO: 757 - RNA, 21 nt, synthetic construct
  source 1..21: mol_type = other RNA
  modified_base 1: mod_base = OTHER; note = 2'-O-methylguanosine with phosphorothioate linkage
  modified_base 2: mod_base = OTHER; note = 2'-O-methylcytidine with phosphorothioate linkage
  modified_base 3: mod_base = OTHER; note = 2'-O-methylcytidine
  modified_base 4: mod_base = OTHER; note = 2'-O-methyladenosine
  modified_base 5: mod_base = OTHER; note = 2'-O-methyluridine
  modified_base 6: mod_base = OTHER; note = 2'-O-methylcytidine
  modified_base 7: mod_base = OTHER; note = 2'-fluoroadenosine
  modified_base 8: mod_base = OTHER; note = 2'-O-methyladenosine
  modified_base 9: mod_base = OTHER; note = 2'-fluoroadenosine
  modified_base 10: mod_base = OTHER; note = 2'-fluoroguanosine
  modified_base 11: mod_base = OTHER; note = 2'-fluoroguanosine
  modified_base 12: mod_base = OTHER; note = 2'-O-methyladenosine
  modified_base 13: mod_base = OTHER; note = 2'-O-methylcytidine
  modified_base 14: mod_base = OTHER; note = 2'-O-methyladenosine
  modified_base 15: mod_base = OTHER; note = 2'-O-methyluridine
  modified_base 16: mod_base = OTHER; note = 2'-O-methylcytidine
  modified_base 17: mod_base = OTHER; note = 2'-O-methylcytidine
  modified_base 18: mod_base = OTHER; note = 2'-O-methylcytidine
  modified_base 19: mod_base = OTHER; note = 2'-O-methyluridine
  modified_base 20: mod_base = OTHER; note = 2'-O-methylguanosine
  modified_base 21: mod_base = OTHER; note = 2'-O-methyladenosine
gccatcaaaggacatccctga

SEQ ID NO: 758 - RNA, 21 nt, synthetic construct
  source 1..21: mol_type = other RNA
  modified_base 1: mod_base = OTHER; note = 2'-O-methylcytidine with phosphorothioate linkage
  modified_base 2: mod_base = OTHER; note = 2'-O-methyladenosine with phosphorothioate linkage
  modified_base 3: mod_base = OTHER; note = 2'-O-methyluridine
  modified_base 4: mod_base = OTHER; note = 2'-O-methylcytidine
  modified_base 5: mod_base = OTHER; note = 2'-O-methyluridine
  modified_base 6: mod_base = OTHER; note = 2'-O-methylcytidine
  modified_base 7: mod_base = OTHER; note = 2'-fluorouridine
  modified_base 8: mod_base = OTHER; note = 2'-O-methylguanosine
  modified_base 9: mod_base = OTHER; note = 2'-fluorouridine
  modified_base 10: mod_base = OTHER; note = 2'-fluorocytidine
  modified_base 11: mod_base = OTHER; note = 2'-fluoroadenosine
  modified_base 12: mod_base = OTHER; note = 2'-O-methylcytidine
  modified_base 13: mod_base = OTHER; note = 2'-O-methylguanosine
  modified_base 14: mod_base = OTHER; note = 2'-O-methyluridine
  modified_base 15: mod_base = OTHER; note = 2'-O-methylcytidine
  modified_base 16: mod_base = OTHER; note = 2'-O-methylcytidine
  modified_base 17: mod_base = OTHER; note = 2'-O-methyladenosine
  modified_base 18: mod_base = OTHER; note = 2'-O-methylcytidine
  modified_base 19: mod_base = OTHER; note = 2'-O-methyluridine
  modified_base 20: mod_base = OTHER; note = 2'-O-methyladenosine
  modified_base 21: mod_base = OTHER; note = 2'-O-methyladenosine
catctctgtcacgtccactaa

SEQ ID NO: 759 - RNA, 21 nt, synthetic construct
  source 1..21: mol_type = other RNA
  modified_base 1: mod_base = OTHER; note = 2'-O-methyladenosine with phosphorothioate linkage
  modified_base 2: mod_base = OTHER; note = 2'-O-methyluridine with phosphorothioate linkage
  modified_base 3: mod_base = OTHER; note = 2'-O-methylcytidine
  modified_base 4: mod_base = OTHER; note = 2'-O-methyluridine
  modified_base 5: mod_base = OTHER; note = 2'-O-methylcytidine
  modified_base 6: mod_base = OTHER; note = 2'-O-methyluridine
  modified_base 7: mod_base = OTHER; note = 2'-fluoroguanosine
  modified_base 8: mod_base = OTHER; note = 2'-O-methyluridine
  modified_base 9: mod_base = OTHER; note = 2'-fluorocytidine
  modified_base 10: mod_base = OTHER; note = 2'-fluoroadenosine
  modified_base 11: mod_base = OTHER; note = 2'-fluorocytidine
  modified_base 12: mod_base = OTHER; note = 2'-O-methylguanosine
  modified_base 13: mod_base = OTHER; note = 2'-O-methyluridine
  modified_base 14: mod_base = OTHER; note = 2'-O-methylcytidine
  modified_base 15: mod_base = OTHER; note = 2'-O-methylcytidine
  modified_base 16: mod_base = OTHER; note = 2'-O-methyladenosine
  modified_base 17: mod_base = OTHER; note = 2'-O-methylcytidine
  modified_base 18: mod_base = OTHER; note = 2'-O-methyluridine
  modified_base 19: mod_base = OTHER; note = 2'-O-methyladenosine
  modified_base 20: mod_base = OTHER; note = 2'-O-methyladenosine
  modified_base 21: mod_base = OTHER; note = 2'-O-methyladenosine
atctctgtcacgtccactaaa

SEQ ID NO: 760 - RNA, 21 nt, synthetic construct
  source 1..21: mol_type = other RNA
  modified_base 1: mod_base = OTHER; note = 2'-O-methyluridine with phosphorothioate linkage
  modified_base 2: mod_base = OTHER; note = 2'-O-methylcytidine with phosphorothioate linkage
  modified_base 3: mod_base = OTHER; note = 2'-O-methyluridine
  modified_base 4: mod_base = OTHER; note = 2'-O-methylcytidine
  modified_base 5: mod_base = OTHER; note = 2'-O-methyluridine
  modified_base 6: mod_base = OTHER; note = 2'-O-methylguanosine
  modified_base 7: mod_base = OTHER; note = 2'-fluorouridine
  modified_base 8: mod_base = OTHER; note = 2'-O-methylcytidine
  modified_base 9: mod_base = OTHER; note = 2'-fluoroadenosine
  modified_base 10: mod_base = OTHER; note = 2'-fluorocytidine
  modified_base 11: mod_base = OTHER; note = 2'-fluoroguanosine
  modified_base 12: mod_base = OTHER; note = 2'-O-methyluridine
  modified_base 13: mod_base = OTHER; note = 2'-O-methylcytidine
  modified_base 14: mod_base = OTHER; note = 2'-O-methylcytidine
  modified_base 15: mod_base = OTHER; note = 2'-O-methyladenosine
  modified_base 16: mod_base = OTHER; note = 2'-O-methylcytidine
  modified_base 17: mod_base = OTHER; note = 2'-O-methyluridine
  modified_base 18: mod_base = OTHER; note = 2'-O-methyladenosine
  modified_base 19: mod_base = OTHER; note = 2'-O-methyladenosine
  modified_base 20: mod_base = OTHER; note = 2'-O-methyluridine
  modified_base 21: mod_base = OTHER; note = 2'-O-methyladenosine
tctctgtcacgtccactaata

SEQ ID NO: 761 - RNA, 21 nt, synthetic construct
  source 1..21: mol_type = other RNA
  modified_base 1: mod_base = OTHER; note = 2'-O-methylcytidine with phosphorothioate linkage
  modified_base 2: mod_base = OTHER; note = 2'-O-methyluridine with phosphorothioate linkage
  modified_base 3: mod_base = OTHER; note = 2'-O-methylcytidine
  modified_base 4: mod_base = OTHER; note = 2'-O-methyluridine
  modified_base 5: mod_base = OTHER; note = 2'-O-methylguanosine
  modified_base 6: mod_base = OTHER; note = 2'-O-methyluridine
  modified_base 7: mod_base = OTHER; note = 2'-fluorocytidine
  modified_base 8: mod_base = OTHER; note = 2'-O-methyladenosine
  modified_base 9: mod_base = OTHER; note = 2'-fluorocytidine
  modified_base 10: mod_base = OTHER; note = 2'-fluoroguanosine
  modified_base 11: mod_base = OTHER; note = 2'-fluorouridine
  modified_base 12: mod_base = OTHER; note = 2'-O-methylcytidine
  modified_base 13: mod_base = OTHER; note = 2'-O-methylcytidine
  modified_base 14: mod_base = OTHER; note = 2'-O-methyladenosine
  modified_base 15: mod_base = OTHER; note = 2'-O-methylcytidine
  modified_base 16: mod_base = OTHER; note = 2'-O-methyluridine
  modified_base 17: mod_base = OTHER; note = 2'-O-methyladenosine
  modified_base 18: mod_base = OTHER; note = 2'-O-methyladenosine
  modified_base 19: mod_base = OTHER; note = 2'-O-methyluridine
  modified_base 20: mod_base = OTHER; note = 2'-O-methylcytidine
  modified_base 21: mod_base = OTHER; note = 2'-O-methyladenosine
ctctgtcacgtccactaatca

SEQ ID NO: 762 - RNA, 21 nt, synthetic construct
  source 1..21: mol_type = other RNA
  modified_base 1: mod_base = OTHER; note = 2'-O-methyluridine with phosphorothioate linkage
  modified_base 2: mod_base = OTHER; note = 2'-O-methylcytidine with phosphorothioate linkage
  modified_base 3: mod_base = OTHER; note = 2'-O-methyluridine
  modified_base 4: mod_base = OTHER; note = 2'-O-methylguanosine
  modified_base 5: mod_base = OTHER; note = 2'-O-methyluridine
  modified_base 6: mod_base = OTHER; note = 2'-O-methylcytidine
  modified_base 7: mod_base = OTHER; note = 2'-fluoroadenosine
  modified_base 8: mod_base = OTHER; note = 2'-O-methylcytidine
  modified_base 9: mod_base = OTHER; note = 2'-fluoroguanosine
  modified_base 10: mod_base = OTHER; note = 2'-fluorouridine
  modified_base 11: mod_base = OTHER; note = 2'-fluorocytidine
  modified_base 12: mod_base = OTHER; note = 2'-O-methylcytidine
  modified_base 13: mod_base = OTHER; note = 2'-O-methyladenosine
  modified_base 14: mod_base = OTHER; note = 2'-O-methylcytidine
  modified_base 15: mod_base = OTHER; note = 2'-O-methyluridine
  modified_base 16: mod_base = OTHER; note = 2'-O-methyladenosine
  modified_base 17: mod_base = OTHER; note = 2'-O-methyladenosine
  modified_base 18: mod_base = OTHER; note = 2'-O-methyluridine
  modified_base 19: mod_base = OTHER; note = 2'-O-methylcytidine
  modified_base 20: mod_base = OTHER; note = 2'-O-methylguanosine
  modified_base 21: mod_base = OTHER; note = 2'-O-methyladenosine
tctgtcacgtccactaatcga

SEQ ID NO: 763 - RNA, 21 nt, synthetic construct
  source 1..21: mol_type = other RNA
  modified_base 1: mod_base = OTHER; note = 2'-O-methylcytidine with phosphorothioate linkage
  modified_base 2: mod_base = OTHER; note = 2'-O-methyluridine with phosphorothioate linkage
  modified_base 3: mod_base = OTHER; note = 2'-O-methylguanosine
  modified_base 4: mod_base = OTHER; note = 2'-O-methyluridine
  modified_base 5: mod_base = OTHER; note = 2'-O-methylcytidine
  modified_base 6: mod_base = OTHER; note = 2'-O-methyladenosine
  modified_base 7: mod_base = OTHER; note = 2'-fluorocytidine
  modified_base 8: mod_base = OTHER; note = 2'-O-methylguanosine
  modified_base 9: mod_base = OTHER; note = 2'-fluorouridine
  modified_base 10: mod_base = OTHER; note = 2'-fluorocytidine
  modified_base 11: mod_base = OTHER; note = 2'-fluorocytidine
  modified_base 12: mod_base = OTHER; note = 2'-O-methyladenosine
  modified_base 13: mod_base = OTHER; note = 2'-O-methylcytidine
  modified_base 14: mod_base = OTHER; note = 2'-O-methyluridine
  modified_base 15: mod_base = OTHER; note = 2'-O-methyladenosine
  modified_base 16: mod_base = OTHER; note = 2'-O-methyladenosine
  modified_base 17: mod_base = OTHER; note = 2'-O-methyluridine
  modified_base 18: mod_base = OTHER; note = 2'-O-methylcytidine
  modified_base 19: mod_base = OTHER; note = 2'-O-methylguanosine
  modified_base 20: mod_base = OTHER; note = 2'-O-methylguanosine
  modified_base 21: mod_base = OTHER; note = 2'-O-methyladenosine
ctgtcacgtccactaatcgga

SEQ ID NO: 764 - RNA, 21 nt, synthetic construct
  source 1..21: mol_type = other RNA
  modified_base 1: mod_base = OTHER; note = 2'-O-methyluridine with phosphorothioate linkage
  modified_base 2: mod_base = OTHER; note = 2'-O-methylguanosine with phosphorothioate linkage
  modified_base 3: mod_base = OTHER; note = 2'-O-methyluridine
  modified_base 4: mod_base = OTHER; note = 2'-O-methylcytidine
  modified_base 5: mod_base = OTHER; note = 2'-O-methyladenosine
  modified_base 6: mod_base = OTHER; note = 2'-O-methylcytidine
  modified_base 7: mod_base = OTHER; note = 2'-fluoroguanosine
  modified_base 8: mod_base = OTHER; note = 2'-O-methyluridine
  modified_base 9: mod_base = OTHER; note = 2'-fluorocytidine
  modified_base 10: mod_base = OTHER; note = 2'-fluorocytidine
  modified_base 11: mod_base = OTHER; note = 2'-fluoroadenosine
  modified_base 12: mod_base = OTHER; note = 2'-O-methylcytidine
  modified_base 13: mod_base = OTHER; note = 2'-O-methyluridine
  modified_base 14: mod_base = OTHER; note = 2'-O-methyladenosine
  modified_base 15: mod_base = OTHER; note = 2'-O-methyladenosine
  modified_base 16: mod_base = OTHER; note = 2'-O-methyluridine
  modified_base 17: mod_base = OTHER; note = 2'-O-methylcytidine
  modified_base 18: mod_base = OTHER; note = 2'-O-methylguanosine
  modified_base 19: mod_base = OTHER; note = 2'-O-methylguanosine
  modified_base 20: mod_base = OTHER; note = 2'-O-methylcytidine
  modified_base 21: mod_base = OTHER; note = 2'-O-methyladenosine
tgtcacgtccactaatcggca

SEQ ID NO: 765 - RNA, 21 nt, synthetic construct
  source 1..21: mol_type = other RNA
  modified_base 1: mod_base = OTHER; note = 2'-O-methylguanosine with phosphorothioate linkage
  modified_base 2: mod_base = OTHER; note = 2'-O-methyluridine with phosphorothioate linkage
  modified_base 3: mod_base = OTHER; note = 2'-O-methylcytidine
  modified_base 4: mod_base = OTHER; note = 2'-O-methyladenosine
  modified_base 5: mod_base = OTHER; note = 2'-O-methylcytidine
  modified_base 6: mod_base = OTHER; note = 2'-O-methylguanosine
  modified_base 7: mod_base = OTHER; note = 2'-fluorouridine
  modified_base 8: mod_base = OTHER; note = 2'-O-methylcytidine
  modified_base 9: mod_base = OTHER; note = 2'-fluorocytidine
  modified_base 10: mod_base = OTHER; note = 2'-fluoroadenosine
  modified_base 11: mod_base = OTHER; note = 2'-fluorocytidine
  modified_base 12: mod_base = OTHER; note = 2'-O-methyluridine
  modified_base 13: mod_base = OTHER; note = 2'-O-methyladenosine
  modified_base 14: mod_base = OTHER; note = 2'-O-methyladenosine
  modified_base 15: mod_base = OTHER; note = 2'-O-methyluridine
  modified_base 16: mod_base = OTHER; note = 2'-O-methylcytidine
  modified_base 17: mod_base = OTHER; note = 2'-O-methylguanosine
  modified_base 18: mod_base = OTHER; note = 2'-O-methylguanosine
  modified_base 19: mod_base = OTHER; note = 2'-O-methylcytidine
  modified_base 20: mod_base = OTHER; note = 2'-O-methyladenosine
  modified_base 21: mod_base = OTHER; note = 2'-O-methyladenosine
gtcacgtccactaatcggcaa

SEQ ID NO: 766 - RNA, 21 nt, synthetic construct
  source 1..21: mol_type = other RNA
  modified_base 1: mod_base = OTHER; note = 2'-O-methyluridine with phosphorothioate linkage
  modified_base 2: mod_base = OTHER; note = 2'-O-methylcytidine with phosphorothioate linkage
  modified_base 3: mod_base = OTHER; note = 2'-O-methyladenosine
  modified_base 4: mod_base = OTHER; note = 2'-O-methylcytidine
  modified_base 5: mod_base = OTHER; note = 2'-O-methylguanosine
  modified_base 6: mod_base = OTHER; note = 2'-O-methyluridine
  modified_base 7: mod_base = OTHER; note = 2'-fluorocytidine
  modified_base 8: mod_base = OTHER; note = 2'-O-methylcytidine
  modified_base 9: mod_base = OTHER; note = 2'-fluoroadenosine
  modified_base 10: mod_base = OTHER; note = 2'-fluorocytidine
  modified_base 11: mod_base = OTHER; note = 2'-fluorouridine
  modified_base 12: mod_base = OTHER; note = 2'-O-methyladenosine
  modified_base 13: mod_base = OTHER; note = 2'-O-methyladenosine
  modified_base 14: mod_base = OTHER; note = 2'-O-methyluridine
  modified_base 15: mod_base = OTHER; note = 2'-O-methylcytidine
  modified_base 16: mod_base = OTHER; note = 2'-O-methylguanosine
  modified_base 17: mod_base = OTHER; note = 2'-O-methylguanosine
  modified_base 18: mod_base = OTHER; note = 2'-O-methylcytidine
  modified_base 19: mod_base = OTHER; note = 2'-O-methyladenosine
  modified_base 20: mod_base = OTHER; note = 2'-O-methyladenosine
  modified_base 21: mod_base = OTHER; note = 2'-O-methyladenosine
tcacgtccactaatcggcaaa

SEQ ID NO: 767 - RNA, 21 nt, synthetic construct
  source 1..21: mol_type = other RNA
  modified_base 1: mod_base = OTHER; note = 2'-O-methylcytidine with phosphorothioate linkage
  modified_base 2: mod_base = OTHER; note = 2'-O-methyladenosine with phosphorothioate linkage
  modified_base 3: mod_base = OTHER; note = 2'-O-methylcytidine
  modified_base 4: mod_base = OTHER; note = 2'-O-methylguanosine
  modified_base 5: mod_base = OTHER; note = 2'-O-methyluridine
  modified_base 6: mod_base = OTHER; note = 2'-O-methylcytidine
  modified_base 7: mod_base = OTHER; note = 2'-fluorocytidine
  modified_base 8: mod_base = OTHER; note = 2'-O-methyladenosine
  modified_base 9: mod_base = OTHER; note = 2'-fluorocytidine
  modified_base 10: mod_base = OTHER; note = 2'-fluorouridine
  modified_base 11: mod_base = OTHER; note = 2'-fluoroadenosine
  modified_base 12: mod_base = OTHER; note = 2'-O-methyladenosine
  modified_base 13: mod_base = OTHER; note = 2'-O-methyluridine
  modified_base 14: mod_base = OTHER; note = 2'-O-methylcytidine
  modified_base 15: mod_base = OTHER; note = 2'-O-methylguanosine
  modified_base 16: mod_base = OTHER; note = 2'-O-methylguanosine
  modified_base 17: mod_base = OTHER; note = 2'-O-methylcytidine
  modified_base 18: mod_base = OTHER; note = 2'-O-methyladenosine
  modified_base 19: mod_base = OTHER; note = 2'-O-methyladenosine
  modified_base 20: mod_base = OTHER; note = 2'-O-methyladenosine
  modified_base 21: mod_base = OTHER; note = 2'-O-methyladenosine
cacgtccactaatcggcaaaa

SEQ ID NO: 768 - RNA, 21 nt, synthetic construct
  source 1..21: mol_type = other RNA
  modified_base 1: mod_base = OTHER; note = 2'-O-methylcytidine with phosphorothioate linkage
  modified_base 2: mod_base = OTHER; note = 2'-O-methylguanosine with phosphorothioate linkage
  modified_base 3: mod_base = OTHER; note = 2'-O-methyluridine
  modified_base 4: mod_base = OTHER; note = 2'-O-methylcytidine
  modified_base 5: mod_base = OTHER; note = 2'-O-methylcytidine
  modified_base 6: mod_base = OTHER; note = 2'-O-methyladenosine
  modified_base 7: mod_base = OTHER; note = 2'-fluorocytidine
  modified_base 8: mod_base = OTHER; note = 2'-O-methyluridine
  modified_base 9: mod_base = OTHER; note = 2'-fluoroadenosine
  modified_base 10: mod_base = OTHER; note = 2'-fluoroadenosine
  modified_base 11: mod_base = OTHER; note = 2'-fluorouridine
  modified_base 12: mod_base = OTHER; note = 2'-O-methylcytidine
  modified_base 13: mod_base = OTHER; note = 2'-O-methylguanosine
  modified_base 14: mod_base = OTHER; note = 2'-O-methylguanosine
  modified_base 15: mod_base = OTHER; note = 2'-O-methylcytidine
  modified_base 16: mod_base = OTHER; note = 2'-O-methyladenosine
  modified_base 17: mod_base = OTHER; note = 2'-O-methyladenosine
  modified_base 18: mod_base = OTHER; note = 2'-O-methyladenosine
  modified_base 19: mod_base = OTHER; note = 2'-O-methyladenosine
  modified_base 20: mod_base = OTHER; note = 2'-O-methylguanosine
  modified_base 21: mod_base = OTHER; note = 2'-O-methyladenosine
cgtccactaatcggcaaaaga

SEQ ID NO: 769 - RNA, 21 nt, synthetic construct
  source 1..21: mol_type = other RNA
  modified_base 1: mod_base = OTHER; note = 2'-O-methylguanosine with phosphorothioate linkage
  modified_base 2: mod_base = OTHER; note = 2'-O-methyluridine with phosphorothioate linkage
  modified_base 3: mod_base = OTHER; note = 2'-O-methylcytidine
  modified_base 4: mod_base = OTHER; note = 2'-O-methylcytidine
  modified_base 5: mod_base = OTHER; note = 2'-O-methyladenosine
  modified_base 6: mod_base = OTHER; note = 2'-O-methylcytidine
  modified_base 7: mod_base = OTHER; note = 2'-fluorouridine
  modified_base 8: mod_base = OTHER; note = 2'-O-methyladenosine
  modified_base 9: mod_base = OTHER; note = 2'-fluoroadenosine
  modified_base 10: mod_base = OTHER; note = 2'-fluorouridine
  modified_base 11: mod_base = OTHER; note = 2'-fluorocytidine
  modified_base 12: mod_base = OTHER; note = 2'-O-methylguanosine
  modified_base 13: mod_base = OTHER; note = 2'-O-methylguanosine
  modified_base 14: mod_base = OTHER; note = 2'-O-methylcytidine
  modified_base 15: mod_base = OTHER; note = 2'-O-methyladenosine
  modified_base 16: mod_base = OTHER; note = 2'-O-methyladenosine
  modified_base 17: mod_base = OTHER; note = 2'-O-methyladenosine
  modified_base 18: mod_base = OTHER; note = 2'-O-methyladenosine
  modified_base 19: mod_base = OTHER; note = 2'-O-methylguanosine
  modified_base 20: mod_base = OTHER; note = 2'-O-methylguanosine
  modified_base 21: mod_base = OTHER; note = 2'-O-methyladenosine
gtccactaatcggcaaaagga

SEQ ID NO: 770 - RNA, 21 nt, synthetic construct
  source 1..21: mol_type = other RNA
  modified_base 1: mod_base = OTHER; note = 2'-O-methyluridine with phosphorothioate linkage
  modified_base 2: mod_base = OTHER; note = 2'-O-methylcytidine with phosphorothioate linkage
  modified_base 3: mod_base = OTHER; note = 2'-O-methylcytidine
  modified_base 4: mod_base = OTHER; note = 2'-O-methyladenosine
  modified_base 5: mod_base = OTHER; note = 2'-O-methylcytidine
  modified_base 6: mod_base = OTHER; note = 2'-O-methyluridine
  modified_base 7: mod_base = OTHER; note = 2'-fluoroadenosine
  modified_base 8: mod_base = OTHER; note = 2'-O-methyladenosine
  modified_base 9: mod_base = OTHER; note = 2'-fluorouridine
  modified_base 10: mod_base = OTHER; note = 2'-fluorocytidine
  modified_base 11: mod_base = OTHER; note = 2'-fluoroguanosine
  modified_base 12: mod_base = OTHER; note = 2'-O-methylguanosine
  modified_base 13: mod_base = OTHER; note = 2'-O-methylcytidine
  modified_base 14: mod_base = OTHER; note = 2'-O-methyladenosine
  modified_base 15: mod_base = OTHER; note = 2'-O-methyladenosine
  modified_base 16: mod_base = OTHER; note = 2'-O-methyladenosine
  modified_base 17: mod_base = OTHER; note = 2'-O-methyladenosine
  modified_base 18: mod_base = OTHER; note = 2'-O-methylguanosine
  modified_base 19: mod_base = OTHER; note = 2'-O-methylguanosine
  modified_base 20: mod_base = OTHER; note = 2'-O-methyladenosine
  modified_base 21: mod_base = OTHER; note = 2'-O-methyladenosine
tccactaatcggcaaaaggaa

SEQ ID NO: 771 - RNA, 21 nt, synthetic construct
  source 1..21: mol_type = other RNA
  modified_base 1: mod_base = OTHER; note = 2'-O-methylcytidine with phosphorothioate linkage
  modified_base 2: mod_base = OTHER; note = 2'-O-methylcytidine with phosphorothioate linkage
  modified_base 3: mod_base = OTHER; note = 2'-O-methyladenosine
  modified_base 4: mod_base = OTHER; note = 2'-O-methylcytidine
  modified_base 5: mod_base = OTHER; note = 2'-O-methyluridine
  modified_base 6: mod_base = OTHER; note = 2'-O-methyladenosine
  modified_base 7: mod_base = OTHER; note = 2'-fluoroadenosine
  modified_base 8: mod_base = OTHER; note = 2'-O-methyluridine
  modified_base 9: mod_base = OTHER; note = 2'-fluorocytidine
  modified_base 10: mod_base = OTHER; note = 2'-fluoroguanosine
  modified_base 11: mod_base = OTHER; note = 2'-fluoroguanosine
  modified_base 12: mod_base = OTHER; note = 2'-O-methylcytidine
  modified_base 13: mod_base = OTHER; note = 2'-O-methyladenosine
  modified_base 14: mod_base = OTHER; note = 2'-O-methyladenosine
  modified_base 15: mod_base = OTHER; note = 2'-O-methyladenosine
  modified_base 16: mod_base = OTHER; note = 2'-O-methyladenosine
  modified_base 17: mod_base = OTHER; note = 2'-O-methylguanosine
  modified_base 18: mod_base = OTHER; note = 2'-O-methylguanosine
  modified_base 19: mod_base = OTHER; note = 2'-O-methyladenosine
  modified_base 20: mod_base = OTHER; note = 2'-O-methylguanosine
  modified_base 21: mod_base = OTHER; note = 2'-O-methyladenosine
ccactaatcggcaaaaggaga

SEQ ID NO: 772 - RNA, 21 nt, synthetic construct
  source 1..21: mol_type = other RNA
  modified_base 1: mod_base = OTHER; note = 2'-O-methylcytidine with phosphorothioate linkage
  modified_base 2: mod_base = OTHER; note = 2'-O-methyladenosine with phosphorothioate linkage
  modified_base 3: mod_base = OTHER; note = 2'-O-methylcytidine
  modified_base 4: mod_base = OTHER; note = 2'-O-methyluridine
  modified_base 5: mod_base = OTHER; note = 2'-O-methyladenosine
  modified_base 6: mod_base = OTHER; note = 2'-O-methyladenosine
  modified_base 7: mod_base = OTHER; note = 2'-fluorouridine
  modified_base 8: mod_base = OTHER; note = 2'-O-methylcytidine
  modified_base 9: mod_base = OTHER; note = 2'-fluoroguanosine
  modified_base 10: mod_base = OTHER; note = 2'-fluoroguanosine
  modified_base 11: mod_base = OTHER; note = 2'-fluorocytidine
  modified_base 12: mod_base = OTHER; note = 2'-O-methyladenosine
  modified_base 13: mod_base = OTHER; note = 2'-O-methyladenosine
  modified_base 14: mod_base = OTHER; note = 2'-O-methyladenosine
  modified_base 15: mod_base = OTHER; note = 2'-O-methyladenosine
  modified_base 16: mod_base = OTHER; note = 2'-O-methylguanosine
  modified_base 17: mod_base = OTHER; note = 2'-O-methylguanosine
  modified_base 18: mod_base = OTHER; note = 2'-O-methyladenosine
  modified_base 19: mod_base = OTHER; note = 2'-O-methylguanosine
  modified_base 20: mod_base = OTHER; note = 2'-O-methyladenosine
  modified_base 21: mod_base = OTHER; note = 2'-O-methyladenosine
cactaatcggcaaaaggagaa

SEQ ID NO: 773 - RNA, 21 nt, synthetic construct
  source 1..21: mol_type = other RNA
  modified_base 1: mod_base = OTHER; note = 2'-O-methyladenosine with phosphorothioate linkage
  modified_base 2: mod_base = OTHER; note = 2'-O-methylcytidine with phosphorothioate linkage
  modified_base 3: mod_base = OTHER; note = 2'-O-methyluridine
  modified_base 4: mod_base = OTHER; note = 2'-O-methyladenosine
  modified_base 5: mod_base = OTHER; note = 2'-O-methyladenosine
  modified_base 6: mod_base = OTHER; note = 2'-O-methyluridine
  modified_base 7: mod_base = OTHER; note = 2'-fluorocytidine
  modified_base 8: mod_base = OTHER; note = 2'-O-methylguanosine
  modified_base 9: mod_base = OTHER; note = 2'-fluoroguanosine
  modified_base 10: mod_base = OTHER; note = 2'-fluorocytidine
  modified_base 11: mod_base = OTHER; note = 2'-fluoroadenosine
  modified_base 12: mod_base = OTHER; note = 2'-O-methyladenosine
  modified_base 13: mod_base = OTHER; note = 2'-O-methyladenosine
  modified_base 14: mod_base = OTHER; note = 2'-O-methyladenosine
  modified_base 15: mod_base = OTHER; note = 2'-O-methylguanosine
  modified_base 16: mod_base = OTHER; note = 2'-O-methylguanosine
  modified_base 17: mod_base = OTHER; note = 2'-O-methyladenosine
  modified_base 18: mod_base = OTHER; note = 2'-O-methylguanosine
  modified_base 19: mod_base = OTHER; note = 2'-O-methyladenosine
  modified_base 20: mod_base = OTHER; note = 2'-O-methyladenosine
  modified_base 21: mod_base = OTHER; note = 2'-O-methyladenosine
actaatcggcaaaaggagaaa

SEQ ID NO: 774 - RNA, 21 nt, synthetic construct
  source 1..21: mol_type = other RNA
  modified_base 1: mod_base = OTHER; note = 2'-O-methylguanosine with phosphorothioate linkage
  modified_base 2: mod_base = OTHER; note = 2'-O-methyladenosine with phosphorothioate linkage
  modified_base 3: mod_base = OTHER; note = 2'-O-methylguanosine
  modified_base 4: mod_base = OTHER; note = 2'-O-methyladenosine
  modified_base 5: mod_base = OTHER; note = 2'-O-methyladenosine
  modified_base 6: mod_base = OTHER; note = 2'-O-methylguanosine
  modified_base 7: mod_base = OTHER; note = 2'-fluoroadenosine
  modified_base 8: mod_base = OTHER; note = 2'-O-methyluridine
  modified_base 9: mod_base = OTHER; note = 2'-fluoroguanosine
  modified_base 10: mod_base = OTHER; note = 2'-fluoroadenosine
  modified_base 11: mod_base = OTHER; note = 2'-fluorocytidine
  modified_base 12: mod_base = OTHER; note = 2'-O-methylcytidine
  modified_base 13: mod_base = OTHER; note = 2'-O-methyluridine
  modified_base 14: mod_base = OTHER; note = 2'-O-methyladenosine
  modified_base 15: mod_base = OTHER; note = 2'-O-methyladenosine
  modified_base 16: mod_base = OTHER; note = 2'-O-methylguanosine
  modified_base 17: mod_base = OTHER; note = 2'-O-methyluridine
  modified_base 18: mod_base = OTHER; note = 2'-O-methylguanosine
  modified_base 19: mod_base = OTHER; note = 2'-O-methyluridine
  modified_base 20: mod_base = OTHER; note = 2'-O-methylguanosine
  modified_base 21: mod_base = OTHER; note = 2'-O-methyladenosine
gagaagatgacctaagtgtga

SEQ ID NO: 775 - RNA, 21 nt, synthetic construct
  source 1..21: mol_type = other RNA
  modified_base 1: mod_base = OTHER; note = 2'-O-methyluridine with phosphorothioate linkage
  modified_base 2: mod_base = OTHER; note = 2'-O-methylcytidine with phosphorothioate linkage
  modified_base 3: mod_base = OTHER; note = 2'-O-methylcytidine
  modified_base 4: mod_base = OTHER; note = 2'-O-methyluridine
  modified_base 5: mod_base = OTHER; note = 2'-O-methylcytidine
  modified_base 6: mod_base = OTHER; note = 2'-O-methylcytidine
  modified_base 7: mod_base = OTHER; note = 2'-fluoroguanosine
  modified_base 8: mod_base = OTHER; note = 2'-O-methyladenosine
  modified_base 9: mod_base = OTHER; note = 2'-fluorocytidine
  modified_base 10: mod_base = OTHER; note = 2'-fluorocytidine
  modified_base 11: mod_base = OTHER; note = 2'-fluoroadenosine
  modified_base 12: mod_base = OTHER; note = 2'-O-methyladenosine
  modified_base 13: mod_base = OTHER; note = 2'-O-methylguanosine
  modified_base 14: mod_base = OTHER; note = 2'-O-methylguanosine
  modified_base 15: mod_base = OTHER; note = 2'-O-methyladenosine
  modified_base 16: mod_base = OTHER; note = 2'-O-methylguanosine
  modified_base 17: mod_base = OTHER; note = 2'-O-methylguanosine
  modified_base 18: mod_base = OTHER; note = 2'-O-methyladenosine
  modified_base 19: mod_base = OTHER; note = 2'-O-methyladenosine
  modified_base 20: mod_base = OTHER; note = 2'-O-methylguanosine
  modified_base 21: mod_base = OTHER; note = 2'-O-methyladenosine
tcctccgaccaaggaggaaga

SEQ ID NO: 776 - RNA, 21 nt, synthetic construct
  source 1..21: mol_type = other RNA
  modified_base 1: mod_base = OTHER; note = 2'-O-methylcytidine with phosphorothioate linkage
  modified_base 2: mod_base = OTHER; note = 2'-O-methylcytidine with phosphorothioate linkage
  modified_base 3: mod_base = OTHER; note = 2'-O-methyladenosine
  modified_base 4: mod_base = OTHER; note = 2'-O-methylguanosine
  modified_base 5: mod_base = OTHER; note = 2'-O-methylguanosine
  modified_base 6: mod_base = OTHER; note = 2'-O-methylguanosine
  modified_base 7: mod_base = OTHER; note = 2'-fluoroadenosine
  modified_base 8: mod_base = OTHER; note = 2'-O-methyladenosine
  modified_base 9: mod_base = OTHER; note = 2'-fluoroguanosine
  modified_base 10: mod_base = OTHER; note = 2'-fluoroguanosine
  modified_base 11: mod_base = OTHER; note = 2'-fluoroadenosine
  modified_base 12: mod_base = OTHER; note = 2'-O-methyladenosine
  modified_base 13: mod_base = OTHER; note = 2'-O-methylcytidine
  modified_base 14: mod_base = OTHER; note = 2'-O-methyluridine
  modified_base 15: mod_base = OTHER; note = 2'-O-methylcytidine
  modified_base 16: mod_base = OTHER; note = 2'-O-methyluridine
  modified_base 17: mod_base = OTHER; note = 2'-O-methylcytidine
  modified_base 18: mod_base = OTHER; note = 2'-O-methylcytidine
  modified_base 19: mod_base = OTHER; note = 2'-O-methylguanosine
  modified_base 20: mod_base = OTHER; note = 2'-O-methylguanosine
  modified_base 21: mod_base = OTHER; note = 2'-O-methyladenosine
ccagggaaggaactctccgga

SEQ ID NO: 777 - RNA, 21 nt, synthetic construct
  source 1..21: mol_type = other RNA
  modified_base 1: mod_base = OTHER; note = 2'-O-methylcytidine with phosphorothioate linkage
  modified_base 2: mod_base = OTHER; note = 2'-O-methyladenosine with phosphorothioate linkage
  modified_base 3: mod_base = OTHER; note = 2'-O-methylguanosine
  modified_base 4: mod_base = OTHER; note = 2'-O-methylguanosine
  modified_base 5: mod_base = OTHER; note = 2'-O-methylguanosine
  modified_base 6: mod_base = OTHER; note = 2'-O-methyladenosine
  modified_base 7: mod_base = OTHER; note = 2'-fluoroadenosine
  modified_base 8: mod_base = OTHER; note = 2'-O-methylguanosine
  modified_base 9: mod_base = OTHER; note = 2'-fluoroguanosine
  modified_base 10: mod_base = OTHER; note = 2'-fluoroadenosine
  modified_base 11: mod_base = OTHER; note = 2'-fluoroadenosine
  modified_base 12: mod_base = OTHER; note = 2'-O-methylcytidine
  modified_base 13: mod_base = OTHER; note = 2'-O-methyluridine
  modified_base 14: mod_base = OTHER; note = 2'-O-methylcytidine
  modified_base 15: mod_base = OTHER; note = 2'-O-methyluridine
  modified_base 16: mod_base = OTHER; note = 2'-O-methylcytidine
  modified_base 17: mod_base = OTHER; note = 2'-O-methylcytidine
  modified_base 18: mod_base = OTHER; note = 2'-O-methylguanosine
  modified_base 19: mod_base = OTHER; note = 2'-O-methylguanosine
  modified_base 20: mod_base = OTHER; note = 2'-O-methyluridine
  modified_base 21: mod_base = OTHER; note = 2'-O-methyladenosine
cagggaaggaactctccggta

SEQ ID NO: 778 - RNA, 21 nt, synthetic construct
  source 1..21: mol_type = other RNA
  modified_base 1: mod_base = OTHER; note = 2'-O-methyladenosine with phosphorothioate linkage
  modified_base 2: mod_base = OTHER; note = 2'-O-methylguanosine with phosphorothioate linkage
  modified_base 3: mod_base = OTHER; note = 2'-O-methylguanosine
  modified_base 4: mod_base = OTHER; note = 2'-O-methyladenosine
  modified_base 5: mod_base = OTHER; note = 2'-O-methyladenosine
  modified_base 6: mod_base = OTHER; note = 2'-O-methylcytidine
  modified_base 7: mod_base = OTHER; note = 2'-fluorouridine
  modified_base 8: mod_base = OTHER; note = 2'-O-methylcytidine
  modified_base 9: mod_base = OTHER; note = 2'-fluorouridine
  modified_base 10: mod_base = OTHER; note = 2'-fluorocytidine
  modified_base 11: mod_base = OTHER; note = 2'-fluorocytidine
  modified_base 12: mod_base = OTHER; note = 2'-O-methylguanosine
  modified_base 13: mod_base = OTHER; note = 2'-O-methylguanosine
  modified_base 14: mod_base = OTHER; note = 2'-O-methyluridine
  modified_base 15: mod_base = OTHER; note = 2'-O-methylcytidine
  modified_base 16: mod_base = OTHER; note = 2'-O-methylcytidine
  modified_base 17: mod_base = OTHER; note = 2'-O-methyladenosine
  modified_base 18: mod_base = OTHER; note = 2'-O-methylcytidine
  modified_base 19: mod_base = OTHER; note = 2'-O-methylcytidine
  modified_base 20: mod_base = OTHER; note = 2'-O-methyladenosine
  modified_base 21: mod_base = OTHER; note = 2'-O-methyladenosine
aggaactctccggtccaccaa

SEQ ID NO: 779 - RNA, 21 nt, synthetic construct
  source 1..21: mol_type = other RNA
  modified_base 1: mod_base = OTHER; note = 2'-O-methylguanosine with phosphorothioate linkage
  modified_base 2: mod_base = OTHER; note = 2'-O-methylguanosine with phosphorothioate linkage
  modified_base 3: mod_base = OTHER; note = 2'-O-methyladenosine
  modified_base 4: mod_base = OTHER; note = 2'-O-methyladenosine
  modified_base 5: mod_base = OTHER; note = 2'-O-methylcytidine
  modified_base 6: mod_base = OTHER; note = 2'-O-methyluridine
  modified_base 7: mod_base = OTHER; note = 2'-fluorocytidine
  modified_base 8: mod_base = OTHER; note = 2'-O-methyluridine
  modified_base 9: mod_base = OTHER; note = 2'-fluorocytidine
  modified_base 10: mod_base = OTHER; note = 2'-fluorocytidine
  modified_base 11: mod_base = OTHER; note = 2'-fluoroguanosine
  modified_base 12: mod_base = OTHER; note = 2'-O-methylguanosine
  modified_base 13: mod_base = OTHER; note = 2'-O-methyluridine
  modified_base 14: mod_base = OTHER; note = 2'-O-methylcytidine
  modified_base 15: mod_base = OTHER; note = 2'-O-methylcytidine
  modified_base 16: mod_base = OTHER; note = 2'-O-methyladenosine
  modified_base 17: mod_base = OTHER; note = 2'-O-methylcytidine
  modified_base 18: mod_base = OTHER; note = 2'-O-methylcytidine
  modified_base 19: mod_base = OTHER; note = 2'-O-methyladenosine
  modified_base 20: mod_base = OTHER; note = 2'-O-methyluridine
  modified_base 21: mod_base = OTHER; note = 2'-O-methyladenosine
ggaactctccggtccaccata

SEQ ID NO: 780 - RNA, 21 nt, synthetic construct
  source 1..21: mol_type = other RNA
  modified_base 1: mod_base = OTHER; note = 2'-O-methyladenosine with phosphorothioate linkage
  modified_base 2: mod_base = OTHER; note = 2'-O-methylcytidine with phosphorothioate linkage
  modified_base 3: mod_base = OTHER; note = 2'-O-methyluridine
  modified_base 4: mod_base = OTHER; note = 2'-O-methylcytidine
  modified_base 5: mod_base = OTHER; note = 2'-O-methyluridine
  modified_base 6: mod_base = OTHER; note = 2'-O-methylcytidine
  modified_base 7: mod_base = OTHER; note = 2'-fluorocytidine
  modified_base 8: mod_base = OTHER; note = 2'-O-methylguanosine
  modified_base 9: mod_base = OTHER; note = 2'-fluoroguanosine
  modified_base 10: mod_base = OTHER; note = 2'-fluorouridine
  modified_base 11: mod_base = OTHER; note = 2'-fluorocytidine
  modified_base 12: mod_base = OTHER; note = 2'-O-methylcytidine
  modified_base 13: mod_base = OTHER; note = 2'-O-methyladenosine
  modified_base 14: mod_base = OTHER; note = 2'-O-methylcytidine
  modified_base 15: mod_base = OTHER; note = 2'-O-methylcytidine
  modified_base 16: mod_base = OTHER; note = 2'-O-methyladenosine
  modified_base 17: mod_base = OTHER; note = 2'-O-methyluridine
  modified_base 18: mod_base = OTHER; note = 2'-O-methylguanosine
  modified_base 19: mod_base = OTHER; note = 2'-O-methylguanosine
  modified_base 20: mod_base = OTHER; note = 2'-O-methyladenosine
  modified_base 21: mod_base = OTHER; note = 2'-O-methyladenosine
actctccggtccaccatggaa

SEQ ID NO: 781 - RNA, 21 nt, synthetic construct
  source 1..21: mol_type = other RNA
  modified_base 1: mod_base = OTHER; note = 2'-O-methylcytidine with phosphorothioate linkage
  modified_base 2: mod_base = OTHER; note = 2'-O-methyluridine with phosphorothioate linkage
  modified_base 3: mod_base = OTHER; note = 2'-O-methylcytidine
  modified_base 4: mod_base = OTHER; note = 2'-O-methylcytidine
  modified_base 5: mod_base = OTHER; note = 2'-O-methylguanosine
  modified_base 6: mod_base = OTHER; note = 2'-O-methylguanosine
  modified_base 7: mod_base = OTHER; note = 2'-fluorouridine
  modified_base 8: mod_base = OTHER; note = 2'-O-methylcytidine
  modified_base 9: mod_base = OTHER; note = 2'-fluorocytidine
  modified_base 10: mod_base = OTHER; note = 2'-fluoroadenosine
  modified_base 11: mod_base = OTHER; note = 2'-fluorocytidine
  modified_base 12: mod_base = OTHER; note = 2'-O-methylcytidine
  modified_base 13: mod_base = OTHER; note = 2'-O-methyladenosine
  modified_base 14: mod_base = OTHER; note = 2'-O-methyluridine
  modified_base 15: mod_base = OTHER; note = 2'-O-methylguanosine
  modified_base 16: mod_base = OTHER; note = 2'-O-methylguanosine
  modified_base 17: mod_base = OTHER; note = 2'-O-methyladenosine
  modified_base 18: mod_base = OTHER; note = 2'-O-methylguanosine
  modified_base 19: mod_base = OTHER; note = 2'-O-methyluridine
  modified_base 20: mod_base = OTHER; note = 2'-O-methyladenosine
  modified_base 21: mod_base = OTHER; note = 2'-O-methyladenosine
ctccggtccaccatggagtaa

SEQ ID NO: 782 - RNA, 21 nt, synthetic construct
  source 1..21: mol_type = other RNA
  modified_base 1: mod_base = OTHER; note = 2'-O-methyluridine with phosphorothioate linkage
  modified_base 2: mod_base = OTHER; note = 2'-O-methylguanosine with phosphorothioate linkage
  modified_base 3: mod_base = OTHER; note = 2'-O-methyladenosine
  modified_base 4: mod_base = OTHER; note = 2'-O-methyladenosine
  modified_base 5: mod_base = OTHER; note = 2'-O-methylcytidine
  modified_base 6: mod_base = OTHER; note = 2'-O-methylcytidine
  modified_base 7: mod_base = OTHER; note = 2'-fluorocytidine
  modified_base 8: mod_base = OTHER; note = 2'-O-methylcytidine
  modified_base 9: mod_base = OTHER; note = 2'-fluoroadenosine
  modified_base 10: mod_base = OTHER; note = 2'-fluoroguanosine
  modified_base 11: mod_base = OTHER; note = 2'-fluorouridine
  modified_base 12: mod_base = OTHER; note = 2'-O-methylguanosine
  modified_base 13: mod_base = OTHER; note = 2'-O-methyladenosine
  modified_base 14: mod_base = OTHER; note = 2'-O-methylcytidine
  modified_base 15: mod_base = OTHER; note = 2'-O-methyluridine
  modified_base 16: mod_base = OTHER; note = 2'-O-methyluridine
  modified_base 17: mod_base = OTHER; note = 2'-O-methyladenosine
  modified_base 18: mod_base = OTHER; note = 2'-O-methylcytidine
  modified_base 19: mod_base = OTHER; note = 2'-O-methyluridine
  modified_base 20: mod_base = OTHER; note = 2'-O-methylcytidine
  modified_base 21: mod_base = OTHER; note = 2'-O-methyladenosine
tgaaccccagtgacttactca

SEQ ID NO: 783 - RNA, 21 nt, synthetic construct
  source 1..21: mol_type = other RNA
  modified_base 1: mod_base = OTHER; note = 2'-O-methylguanosine with phosphorothioate linkage
  modified_base 2: mod_base = OTHER; note = 2'-O-methyluridine with phosphorothioate linkage
  modified_base 3: mod_base = OTHER; note = 2'-O-methylguanosine
  modified_base 4: mod_base = OTHER; note = 2'-O-methyladenosine
  modified_base 5: mod_base = OTHER; note = 2'-O-methylcytidine
  modified_base 6: mod_base = OTHER; note = 2'-O-methyluridine
  modified_base 7: mod_base = OTHER; note = 2'-fluorouridine
  modified_base 8: mod_base = OTHER; note = 2'-O-methyladenosine
  modified_base 9: mod_base = OTHER; note = 2'-fluorocytidine
  modified_base 10: mod_base = OTHER; note = 2'-fluorouridine
  modified_base 11: mod_base = OTHER; note = 2'-fluorocytidine
  modified_base 12: mod_base = OTHER; note = 2'-O-methyladenosine
  modified_base 13: mod_base = OTHER; note = 2'-O-methylguanosine
  modified_base 14: mod_base = OTHER; note = 2'-O-methylguanosine
  modified_base 15: mod_base = OTHER; note = 2'-O-methyluridine
  modified_base 16: mod_base = OTHER; note = 2'-O-methylcytidine
  modified_base 17: mod_base = OTHER; note = 2'-O-methyladenosine
  modified_base 18: mod_base = OTHER; note = 2'-O-methylguanosine
  modified_base 19: mod_base = OTHER; note = 2'-O-methyluridine
  modified_base 20: mod_base = OTHER; note = 2'-O-methyladenosine
  modified_base 21: mod_base = OTHER; note = 2'-O-methyladenosine
gtgacttactcaggtcagtaa

SEQ ID NO: 784 - RNA, 21 nt, synthetic construct
  source 1..21: mol_type = other RNA
  modified_base 1: mod_base = OTHER; note = 2'-O-methylguanosine with phosphorothioate linkage
  modified_base 2: mod_base = OTHER; note = 2'-O-methyladenosine with phosphorothioate linkage
  modified_base 3: mod_base = OTHER; note = 2'-O-methylcytidine
  modified_base 4: mod_base = OTHER; note = 2'-O-methyluridine
  modified_base 5: mod_base = OTHER; note = 2'-O-methyluridine
  modified_base 6: mod_base = OTHER; note = 2'-O-methyladenosine
  modified_base 7: mod_base = OTHER; note = 2'-fluorocytidine
  modified_base 8: mod_base = OTHER; note = 2'-O-methyluridine
  modified_base 9: mod_base = OTHER; note = 2'-fluorocytidine
  modified_base 10: mod_base = OTHER; note = 2'-fluoroadenosine
  modified_base 11: mod_base = OTHER; note = 2'-fluoroguanosine
  modified_base 12: mod_base = OTHER; note = 2'-O-methylguanosine
  modified_base 13: mod_base = OTHER; note = 2'-O-methyluridine
  modified_base 14: mod_base = OTHER; note = 2'-O-methylcytidine
  modified_base 15: mod_base = OTHER; note = 2'-O-methyladenosine
  modified_base 16: mod_base = OTHER; note = 2'-O-methylguanosine
  modified_base 17: mod_base = OTHER; note = 2'-O-methyluridine
  modified_base 18: mod_base = OTHER; note = 2'-O-methyladenosine
  modified_base 19: mod_base = OTHER; note = 2'-O-methyluridine
  modified_base 20: mod_base = OTHER; note = 2'-O-methylcytidine
  modified_base 21: mod_base = OTHER; note = 2'-O-methyladenosine
gacttactcaggtcagtatca

SEQ ID NO: 785 - RNA, 21 nt, synthetic construct
  source 1..21: mol_type = other RNA
  modified_base 1: mod_base = OTHER; note = 2'-O-methylcytidine with phosphorothioate linkage
  modified_base 2: mod_base = OTHER; note = 2'-O-methyluridine with phosphorothioate linkage
  modified_base 3: mod_base = OTHER; note = 2'-O-methyluridine
  modified_base 4: mod_base = OTHER; note = 2'-O-methyladenosine
  modified_base 5: mod_base = OTHER; note = 2'-O-methylcytidine
  modified_base 6: mod_base = OTHER; note = 2'-O-methyluridine
  modified_base 7: mod_base = OTHER; note = 2'-fluorocytidine
  modified_base 8: mod_base = OTHER; note = 2'-O-methyladenosine
  modified_base 9: mod_base = OTHER; note = 2'-fluoroguanosine
  modified_base 10: mod_base = OTHER; note = 2'-fluoroguanosine
  modified_base 11: mod_base = OTHER; note = 2'-fluorouridine
  modified_base 12: mod_base = OTHER; note = 2'-O-methylcytidine
  modified_base 13: mod_base = OTHER; note = 2'-O-methyladenosine
  modified_base 14: mod_base = OTHER; note = 2'-O-methylguanosine
  modified_base 15: mod_base = OTHER; note = 2'-O-methyluridine
  modified_base 16: mod_base = OTHER; note = 2'-O-methyladenosine
  modified_base 17: mod_base = OTHER; note = 2'-O-methyluridine
  modified_base 18: mod_base = OTHER; note = 2'-O-methylcytidine
  modified_base 19: mod_base = OTHER; note = 2'-O-methyluridine
  modified_base 20: mod_base = OTHER; note = 2'-O-methyladenosine
  modified_base 21: mod_base = OTHER; note = 2'-O-methyladenosine
cttactcaggtcagtatctaa

SEQ ID NO: 786 - RNA, 21 nt, synthetic construct
  source 1..21: mol_type = other RNA
  modified_base 1: mod_base = OTHER; note = 2'-O-methylcytidine with phosphorothioate linkage
  modified_base 2: mod_base = OTHER; note = 2'-O-methyladenosine with phosphorothioate linkage
  modified_base 3: mod_base = OTHER; note = 2'-O-methylguanosine
  modified_base 4: mod_base = OTHER; note = 2'-O-methyluridine
  modified_base 5: mod_base = OTHER; note = 2'-O-methyladenosine
  modified_base 6: mod_base = OTHER; note = 2'-O-methyluridine
  modified_base 7: mod_base = OTHER; note = 2'-fluorocytidine
  modified_base 8: mod_base = OTHER; note = 2'-O-methyluridine
  modified_base 9: mod_base = OTHER; note = 2'-fluoroadenosine
  modified_base 10: mod_base = OTHER; note = 2'-fluoroadenosine
  modified_base 11: mod_base = OTHER; note = 2'-fluorouridine
  modified_base 12: mod_base = OTHER; note = 2'-O-methyladenosine
  modified_base 13: mod_base = OTHER; note = 2'-O-methyluridine
  modified_base 14: mod_base = OTHER; note = 2'-O-methyladenosine
  modified_base 15: mod_base = OTHER; note = 2'-O-methyladenosine
  modified_base 16: mod_base = OTHER; note = 2'-O-methylguanosine
  modified_base 17: mod_base = OTHER; note = 2'-O-methylcytidine
  modified_base 18: mod_base = OTHER; note = 2'-O-methyluridine
  modified_base 19: mod_base = OTHER; note = 2'-O-methylcytidine
  modified_base 20: mod_base = OTHER; note = 2'-O-methylguanosine
  modified_base 21: mod_base = OTHER; note = 2'-O-methyladenosine
cagtatctaatataagctcga

SEQ ID NO: 787 - RNA, 21 nt, synthetic construct
  source 1..21: mol_type = other RNA
  modified_base 1: mod_base = OTHER; note = 2'-O-methylguanosine with phosphorothioate linkage
  modified_base 2: mod_base = OTHER; note = 2'-O-methyluridine with phosphorothioate linkage
  modified_base 3: mod_base = OTHER; note = 2'-O-methyladenosine
  modified_base 4: mod_base = OTHER; note = 2'-O-methyluridine
  modified_base 5: mod_base = OTHER; note = 2'-O-methylcytidine
  modified_base 6: mod_base = OTHER; note = 2'-O-methyluridine
  modified_base 7: mod_base = OTHER; note = 2'-fluoroadenosine
  modified_base 8: mod_base = OTHER; note = 2'-O-methyladenosine
  modified_base 9: mod_base = OTHER; note = 2'-fluorouridine
  modified_base 10: mod_base = OTHER; note = 2'-fluoroadenosine
  modified_base 11: mod_base = OTHER; note = 2'-fluorouridine
  modified_base 12: mod_base = OTHER; note = 2'-O-methyladenosine
  modified_base 13: mod_base = OTHER; note = 2'-O-methyladenosine
  modified_base 14: mod_base = OTHER; note = 2'-O-methylguanosine
  modified_base 15: mod_base = OTHER; note = 2'-O-methylcytidine
  modified_base 16: mod_base = OTHER; note = 2'-O-methyluridine
  modified_base 17: mod_base = OTHER; note = 2'-O-methylcytidine
  modified_base 18: mod_base = OTHER; note = 2'-O-methylguanosine
  modified_base 19: mod_base = OTHER; note = 2'-O-methylguanosine
  modified_base 20: mod_base = OTHER; note = 2'-O-methyladenosine
  modified_base 21: mod_base = OTHER; note = 2'-O-methyladenosine
gtatctaatataagctcggaa

SEQ ID NO: 788 - RNA, 21 nt, synthetic construct
  source 1..21: mol_type = other RNA
  modified_base 1: mod_base = OTHER; note = 2'-O-methyluridine with phosphorothioate linkage
  modified_base 2: mod_base = OTHER; note = 2'-O-methyladenosine with phosphorothioate linkage
  modified_base 3: mod_base = OTHER; note = 2'-O-methyluridine
  modified_base 4: mod_base = OTHER; note = 2'-O-methylcytidine
  modified_base 5: mod_base = OTHER; note = 2'-O-methyluridine
  modified_base 6: mod_base = OTHER; note = 2'-O-methyladenosine
  modified_base 7: mod_base = OTHER; note = 2'-fluoroadenosine
  modified_base 8: mod_base = OTHER; note = 2'-O-methyluridine
  modified_base 9: mod_base = OTHER; note = 2'-fluoroadenosine
  modified_base 10: mod_base = OTHER; note = 2'-fluorouridine
  modified_base 11: mod_base = OTHER; note = 2'-fluoroadenosine
  modified_base 12: mod_base = OTHER; note = 2'-O-methyladenosine
  modified_base 13: mod_base = OTHER; note = 2'-O-methylguanosine
  modified_base 14: mod_base = OTHER; note = 2'-O-methylcytidine
  modified_base 15: mod_base = OTHER; note = 2'-O-methyluridine
  modified_base 16: mod_base = OTHER; note = 2'-O-methylcytidine
  modified_base 17: mod_base = OTHER; note = 2'-O-methylguanosine
  modified_base 18: mod_base = OTHER; note = 2'-O-methylguanosine
  modified_base 19: mod_base = OTHER; note = 2'-O-methyladenosine
  modified_base 20: mod_base = OTHER; note = 2'-O-methylguanosine
  modified_base 21: mod_base = OTHER; note = 2'-O-methyladenosine
tatctaatataagctcggaga

SEQ ID NO: 789 - RNA, 21 nt, synthetic construct
  source 1..21: mol_type = other RNA
  modified_base 1: mod_base = OTHER; note = 2'-O-methyladenosine with phosphorothioate linkage
  modified_base 2: mod_base = OTHER; note = 2'-O-methyluridine with phosphorothioate linkage
  modified_base 3: mod_base = OTHER; note = 2'-O-methylcytidine
  modified_base 4: mod_base = OTHER; note = 2'-O-methyluridine
  modified_base 5: mod_base = OTHER; note = 2'-O-methyladenosine
  modified_base 6: mod_base = OTHER; note = 2'-O-methyladenosine
  modified_base 7: mod_base = OTHER; note = 2'-fluorouridine
  modified_base 8: mod_base = OTHER; note = 2'-O-methyladenosine
  modified_base 9: mod_base = OTHER; note = 2'-fluorouridine
  modified_base 10: mod_base = OTHER; note = 2'-fluoroadenosine
  modified_base 11: mod_base = OTHER; note = 2'-fluoroadenosine
  modified_base 12: mod_base = OTHER; note = 2'-O-methylguanosine
  modified_base 13: mod_base = OTHER; note = 2'-O-methylcytidine
  modified_base 14: mod_base = OTHER; note = 2'-O-methyluridine
  modified_base 15: mod_base = OTHER; note = 2'-O-methylcytidine
  modified_base 16: mod_base = OTHER; note = 2'-O-methylguanosine
  modified_base 17: mod_base = OTHER; note = 2'-O-methylguanosine
  modified_base 18: mod_base = OTHER; note = 2'-O-methyladenosine
  modified_base 19: mod_base = OTHER; note = 2'-O-methylguanosine
  modified_base 20: mod_base = OTHER; note = 2'-O-methyluridine
  modified_base 21: mod_base = OTHER; note = 2'-O-methyladenosine
atctaatataagctcggagta

SEQ ID NO: 790 - RNA, 21 nt, synthetic construct
  source 1..21: mol_type = other RNA
  modified_base 1: mod_base = OTHER; note = 2'-O-methyluridine with phosphorothioate linkage
  modified_base 2: mod_base = OTHER; note = 2'-O-methylcytidine with phosphorothioate linkage
  modified_base 3: mod_base = OTHER; note = 2'-O-methyluridine
  modified_base 4: mod_base = OTHER; note = 2'-O-methyladenosine
  modified_base 5: mod_base = OTHER; note = 2'-O-methyladenosine
  modified_base 6: mod_base = OTHER; note = 2'-O-methyluridine
  modified_base 7: mod_base = OTHER; note = 2'-fluoroadenosine
  modified_base 8: mod_base = OTHER; note = 2'-O-methyluridine
  modified_base 9: mod_base = OTHER; note = 2'-fluoroadenosine
  modified_base 10: mod_base = OTHER; note = 2'-fluoroadenosine
  modified_base 11: mod_base = OTHER; note = 2'-fluoroguanosine
  modified_base 12: mod_base = OTHER; note = 2'-O-methylcytidine
  modified_base 13: mod_base = OTHER; note = 2'-O-methyluridine
  modified_base 14: mod_base = OTHER; note = 2'-O-methylcytidine
  modified_base 15: mod_base = OTHER; note = 2'-O-methylguanosine
  modified_base 16: mod_base = OTHER; note = 2'-O-methylguanosine
  modified_base 17: mod_base = OTHER; note = 2'-O-methyladenosine
  modified_base 18: mod_base = OTHER; note = 2'-O-methylguanosine
  modified_base 19: mod_base = OTHER; note = 2'-O-methyluridine
  modified_base 20: mod_base = OTHER; note = 2'-O-methyluridine
  modified_base 21: mod_base = OTHER; note = 2'-O-methyladenosine
tctaatataagctcggagtta

SEQ ID NO: 791 - RNA, 21 nt, synthetic construct
  source 1..21: mol_type = other RNA
  modified_base 1: mod_base = OTHER; note = 2'-O-methylcytidine with phosphorothioate linkage
  modified_base 2: mod_base = OTHER; note = 2'-O-methyluridine with phosphorothioate linkage
  modified_base 3: mod_base = OTHER; note = 2'-O-methyladenosine
  modified_base 4: mod_base = OTHER; note = 2'-O-methyladenosine
  modified_base 5: mod_base = OTHER; note = 2'-O-methyluridine
  modified_base 6: mod_base = OTHER; note = 2'-O-methyladenosine
  modified_base 7: mod_base = OTHER; note = 2'-fluorouridine
  modified_base 8: mod_base = OTHER; note = 2'-O-methyladenosine
  modified_base 9: mod_base = OTHER; note = 2'-fluoroadenosine
  modified_base 10: mod_base = OTHER; note = 2'-fluoroguanosine
  modified_base 11: mod_base = OTHER; note = 2'-fluorocytidine
  modified_base 12: mod_base = OTHER; note = 2'-O-methyluridine
  modified_base 13: mod_base = OTHER; note = 2'-O-methylcytidine
  modified_base 14: mod_base = OTHER; note = 2'-O-methylguanosine
  modified_base 15: mod_base = OTHER; note = 2'-O-methylguanosine
  modified_base 16: mod_base = OTHER; note = 2'-O-methyladenosine
  modified_base 17: mod_base = OTHER; note = 2'-O-methylguanosine
  modified_base 18: mod_base = OTHER; note = 2'-O-methyluridine
  modified_base 19: mod_base = OTHER; note = 2'-O-methyluridine
  modified_base 20: mod_base = OTHER; note = 2'-O-methyluridine
  modified_base 21: mod_base = OTHER; note = 2'-O-methyladenosine
ctaatataagctcggagttta

SEQ ID NO: 792 - RNA, 21 nt, synthetic construct
  source 1..21: mol_type = other RNA
  modified_base 1: mod_base = OTHER; note = 2'-O-methyluridine with phosphorothioate linkage
  modified_base 2: mod_base = OTHER; note = 2'-O-methyladenosine with phosphorothioate linkage
  modified_base 3: mod_base = OTHER; note = 2'-O-methyladenosine
  modified_base 4: mod_base = OTHER; note = 2'-O-methyluridine
  modified_base 5: mod_base = OTHER; note = 2'-O-methyladenosine
  modified_base 6: mod_base = OTHER; note = 2'-O-methyluridine
  modified_base 7: mod_base = OTHER; note = 2'-fluoroadenosine
  modified_base 8: mod_base = OTHER; note = 2'-O-methyladenosine
  modified_base 9: mod_base = OTHER; note = 2'-fluoroguanosine
  modified_base 10: mod_base = OTHER; note = 2'-fluorocytidine
  modified_base 11: mod_base = OTHER; note = 2'-fluorouridine
  modified_base 12: mod_base = OTHER; note = 2'-O-methylcytidine
  modified_base 13: mod_base = OTHER; note = 2'-O-methylguanosine
  modified_base 14: mod_base = OTHER; note = 2'-O-methylguanosine
  modified_base 15: mod_base = OTHER; note = 2'-O-methyladenosine
  modified_base 16: mod_base = OTHER; note = 2'-O-methylguanosine
  modified_base 17: mod_base = OTHER; note = 2'-O-methyluridine
  modified_base 18: mod_base = OTHER; note = 2'-O-methyluridine
  modified_base 19: mod_base = OTHER; note = 2'-O-methyluridine
  modified_base 20: mod_base = OTHER; note = 2'-O-methylguanosine
  modified_base 21: mod_base = OTHER; note = 2'-O-methyladenosine
taatataagctcggagtttga

SEQ ID NO: 793 - RNA, 21 nt, synthetic construct
  source 1..21: mol_type = other RNA
  modified_base 1: mod_base = OTHER; note = 2'-O-methyladenosine with phosphorothioate linkage
  modified_base 2: mod_base = OTHER; note = 2'-O-methyluridine with phosphorothioate linkage
  modified_base 3: mod_base = OTHER; note = 2'-O-methyladenosine
  modified_base 4: mod_base = OTHER; note = 2'-O-methyluridine
  modified_base 5: mod_base = OTHER; note = 2'-O-methyladenosine
  modified_base 6: mod_base = OTHER; note = 2'-O-methyladenosine
  modified_base 7: mod_base = OTHER; note = 2'-fluoroguanosine
  modified_base 8: mod_base = OTHER; note = 2'-O-methylcytidine
  modified_base 9: mod_base = OTHER; note = 2'-fluorouridine
  modified_base 10: mod_base = OTHER; note = 2'-fluorocytidine
  modified_base 11: mod_base = OTHER; note = 2'-fluoroguanosine
  modified_base 12: mod_base = OTHER; note = 2'-O-methylguanosine
  modified_base 13: mod_base = OTHER; note = 2'-O-methyladenosine
  modified_base 14: mod_base = OTHER; note = 2'-O-methylguanosine
  modified_base 15: mod_base = OTHER; note = 2'-O-methyluridine
  modified_base 16: mod_base = OTHER; note = 2'-O-methyluridine
  modified_base 17: mod_base = OTHER; note = 2'-O-methyluridine
  modified_base 18: mod_base = OTHER; note = 2'-O-methylguanosine
  modified_base 19: mod_base = OTHER; note = 2'-O-methylguanosine
  modified_base 20: mod_base = OTHER; note = 2'-O-methyladenosine
  modified_base 21: mod_base = OTHER; note = 2'-O-methyladenosine
atataagctcggagtttggaa

SEQ ID NO: 794 - RNA, 21 nt, synthetic construct
  source 1..21: mol_type = other RNA
  modified_base 1: mod_base = OTHER; note = 2'-O-methyluridine with phosphorothioate linkage
  modified_base 2: mod_base = OTHER; note = 2'-O-methyladenosine with phosphorothioate linkage
  modified_base 3: mod_base = OTHER; note = 2'-O-methyluridine
  modified_base 4: mod_base = OTHER; note = 2'-O-methyladenosine
  modified_base 5: mod_base = OTHER; note = 2'-O-methyladenosine
  modified_base 6: mod_base = OTHER; note = 2'-O-methylguanosine
  modified_base 7: mod_base = OTHER; note = 2'-fluorocytidine
  modified_base 8: mod_base = OTHER; note = 2'-O-methyluridine
  modified_base 9: mod_base = OTHER; note = 2'-fluorocytidine
  modified_base 10: mod_base = OTHER; note = 2'-fluoroguanosine
  modified_base 11: mod_base = OTHER; note = 2'-fluoroguanosine
  modified_base 12: mod_base = OTHER; note = 2'-O-methyladenosine
  modified_base 13: mod_base = OTHER; note = 2'-O-methylguanosine
  modified_base 14: mod_base = OTHER; note = 2'-O-methyluridine
  modified_base 15: mod_base = OTHER; note = 2'-O-methyluridine
  modified_base 16: mod_base = OTHER; note = 2'-O-methyluridine
  modified_base 17: mod_base = OTHER; note = 2'-O-methylguanosine
  modified_base 18: mod_base = OTHER; note = 2'-O-methylguanosine
  modified_base 19: mod_base = OTHER; note = 2'-O-methyladenosine
  modified_base 20: mod_base = OTHER; note = 2'-O-methylcytidine
  modified_base 21: mod_base = OTHER; note = 2'-O-methyladenosine
tataagctcggagtttggaca

SEQ ID NO: 795 - RNA, 21 nt, synthetic construct
  source 1..21: mol_type = other RNA
  modified_base 1: mod_base = OTHER; note = 2'-O-methyladenosine with phosphorothioate linkage
  modified_base 2: mod_base = OTHER; note = 2'-O-methyluridine with phosphorothioate linkage
  modified_base 3: mod_base = OTHER; note = 2'-O-methyladenosine
  modified_base 4: mod_base = OTHER; note = 2'-O-methyladenosine
  modified_base 5: mod_base = OTHER; note = 2'-O-methylguanosine
  modified_base 6: mod_base = OTHER; note = 2'-O-methylcytidine
  modified_base 7: mod_base = OTHER; note = 2'-fluorouridine
  modified_base 8: mod_base = OTHER; note = 2'-O-methylcytidine
  modified_base 9: mod_base = OTHER; note = 2'-fluoroguanosine
  modified_base 10: mod_base = OTHER; note = 2'-fluoroguanosine
  modified_base 11: mod_base = OTHER; note = 2'-fluoroadenosine
  modified_base 12: mod_base = OTHER; note = 2'-O-methylguanosine
  modified_base 13: mod_base = OTHER; note = 2'-O-methyluridine
  modified_base 14: mod_base = OTHER; note = 2'-O-methyluridine
  modified_base 15: mod_base = OTHER; note = 2'-O-methyluridine
  modified_base 16: mod_base = OTHER; note = 2'-O-methylguanosine
  modified_base 17: mod_base = OTHER; note = 2'-O-methylguanosine
  modified_base 18: mod_base = OTHER; note = 2'-O-methyladenosine
  modified_base 19: mod_base = OTHER; note = 2'-O-methylcytidine
  modified_base 20: mod_base = OTHER; note = 2'-O-methylguanosine
  modified_base 21: mod_base = OTHER; note = 2'-O-methyladenosine
ataagctcggagtttggacga

SEQ ID NO: 796 - RNA, 21 nt, synthetic construct
  source 1..21: mol_type = other RNA
  modified_base 1: mod_base = OTHER; note = 2'-O-methylguanosine with phosphorothioate linkage
  modified_base 2: mod_base = OTHER; note = 2'-O-methylcytidine with phosphorothioate linkage
  modified_base 3: mod_base = OTHER; note = 2'-O-methyluridine
  modified_base 4: mod_base = OTHER; note = 2'-O-methylcytidine
  modified_base 5: mod_base = OTHER; note = 2'-O-methylguanosine
  modified_base 6: mod_base = OTHER; note = 2'-O-methylguanosine
  modified_base 7: mod_base = OTHER; note = 2'-fluoroadenosine
  modified_base 8: mod_base = OTHER; note = 2'-O-methylguanosine
  modified_base 9: mod_base = OTHER; note = 2'-fluorouridine
  modified_base 10: mod_base = OTHER; note = 2'-fluorouridine
  modified_base 11: mod_base = OTHER; note = 2'-fluorouridine
  modified_base 12: mod_base = OTHER; note = 2'-O-methylguanosine
  modified_base 13: mod_base = OTHER; note = 2'-O-methylguanosine
  modified_base 14: mod_base = OTHER; note = 2'-O-methyladenosine
  modified_base 15: mod_base = OTHER; note = 2'-O-methylcytidine
  modified_base 16: mod_base = OTHER; note = 2'-O-methylguanosine
  modified_base 17: mod_base = OTHER; note = 2'-O-methylguanosine
  modified_base 18: mod_base = OTHER; note = 2'-O-methyladenosine
  modified_base 19: mod_base = OTHER; note = 2'-O-methylguanosine
  modified_base 20: mod_base = OTHER; note = 2'-O-methylguanosine
  modified_base 21: mod_base = OTHER; note = 2'-O-methyladenosine
gctcggagtttggacggagga

SEQ ID NO: 797 - RNA, 21 nt, synthetic construct
  source 1..21: mol_type = other RNA
  modified_base 1: mod_base = OTHER; note = 2'-O-methylguanosine with phosphorothioate linkage
  modified_base 2: mod_base = OTHER; note = 2'-O-methylguanosine with phosphorothioate linkage
  modified_base 3: mod_base = OTHER; note = 2'-O-methyladenosine
  modified_base 4: mod_base = OTHER; note = 2'-O-methylguanosine
  modified_base 5: mod_base = OTHER; note = 2'-O-methyluridine
  modified_base 6: mod_base = OTHER; note = 2'-O-methyluridine
  modified_base 7: mod_base = OTHER; note = 2'-fluorouridine
  modified_base 8: mod_base = OTHER; note = 2'-O-methylguanosine
  modified_base 9: mod_base = OTHER; note = 2'-fluoroguanosine
  modified_base 10: mod_base = OTHER; note = 2'-fluoroadenosine
  modified_base 11: mod_base = OTHER; note = 2'-fluorocytidine
  modified_base 12: mod_base = OTHER; note = 2'-O-methylguanosine
  modified_base 13: mod_base = OTHER; note = 2'-O-methylguanosine
  modified_base 14: mod_base = OTHER; note = 2'-O-methyladenosine
  modified_base 15: mod_base = OTHER; note = 2'-O-methylguanosine
  modified_base 16: mod_base = OTHER; note = 2'-O-methylguanosine
  modified_base 17: mod_base = OTHER; note = 2'-O-methylguanosine
  modified_base 18: mod_base = OTHER; note = 2'-O-methyluridine
  modified_base 19: mod_base = OTHER; note = 2'-O-methylcytidine
  modified_base 20: mod_base = OTHER; note = 2'-O-methyluridine
  modified_base 21: mod_base = OTHER; note = 2'-O-methyladenosine
ggagtttggacggagggtcta

SEQ ID NO: 798 - RNA, 21 nt, synthetic construct
  source 1..21: mol_type = other RNA
  modified_base 1: mod_base = OTHER; note = 2'-O-methylcytidine with phosphorothioate linkage
  modified_base 2: mod_base = OTHER; note = 2'-O-methyladenosine with phosphorothioate linkage
  modified_base 3: mod_base = OTHER; note = 2'-O-methylcytidine
  modified_base 4: mod_base = OTHER; note = 2'-O-methylcytidine
  modified_base 5: mod_base = OTHER; note = 2'-O-methylcytidine
  modified_base 6: mod_base = OTHER; note = 2'-O-methylcytidine
  modified_base 7: mod_base = OTHER; note = 2'-fluoroadenosine
  modified_base 8: mod_base = OTHER; note = 2'-O-methylguanosine
  modified_base 9: mod_base = OTHER; note = 2'-fluorocytidine
  modified_base 10: mod_base = OTHER; note = 2'-fluoroguanosine
  modified_base 11: mod_base = OTHER; note = 2'-fluoroadenosine
  modified_base 12: mod_base = OTHER; note = 2'-O-methylcytidine
  modified_base 13: mod_base = OTHER; note = 2'-O-methylcytidine
  modified_base 14: mod_base = OTHER; note = 2'-O-methyluridine
  modified_base 15: mod_base = OTHER; note = 2'-O-methyluridine
  modified_base 16: mod_base = OTHER; note = 2'-O-methyluridine
  modified_base 17: mod_base = OTHER; note = 2'-O-methylcytidine
  modified_base 18: mod_base = OTHER; note = 2'-O-methylcytidine
  modified_base 19: mod_base = OTHER; note = 2'-O-methylguanosine
  modified_base 20: mod_base = OTHER; note = 2'-O-methyluridine
  modified_base 21: mod_base = OTHER; note = 2'-O-methyladenosine
caccccagcgacctttccgta

SEQ ID NO: 799 - RNA, 21 nt, synthetic construct
  source 1..21: mol_type = other RNA
  modified_base 1: mod_base = OTHER; note = 2'-O-methylguanosine with phosphorothioate linkage
  modified_base 2: mod_base = OTHER; note = 2'-O-methyluridine with phosphorothioate linkage
  modified_base 3: mod_base = OTHER; note = 2'-O-methylcytidine
  modified_base 4: mod_base = OTHER; note = 2'-O-methyluridine
  modified_base 5: mod_base = OTHER; note = 2'-O-methylguanosine
  modified_base 6: mod_base = OTHER; note = 2'-O-methyluridine
  modified_base 7: mod_base = OTHER; note = 2'-fluoroguanosine
  modified_base 8: mod_base = OTHER; note = 2'-O-methyladenosine
  modified_base 9: mod_base = OTHER; note = 2'-fluorouridine
  modified_base 10: mod_base = OTHER; note = 2'-fluorocytidine
  modified_base 11: mod_base = OTHER; note = 2'-fluoroadenosine
  modified_base 12: mod_base = OTHER; note = 2'-O-methylcytidine
  modified_base 13: mod_base = OTHER; note = 2'-O-methyladenosine
  modified_base 14: mod_base = OTHER; note = 2'-O-methyladenosine
  modified_base 15: mod_base = OTHER; note = 2'-O-methylguanosine
  modified_base 16: mod_base = OTHER; note = 2'-O-methylcytidine
  modified_base 17: mod_base = OTHER; note = 2'-O-methylguanosine
  modified_base 18: mod_base = OTHER; note = 2'-O-methylguanosine
  modified_base 19: mod_base = OTHER; note = 2'-O-methyladenosine
  modified_base 20: mod_base = OTHER; note = 2'-O-methylcytidine
  modified_base 21: mod_base = OTHER; note = 2'-O-methyladenosine
gtctgtgatcacaagcggaca

SEQ ID NO: 800 - RNA, 21 nt, synthetic construct
  source 1..21: mol_type = other RNA
  modified_base 1: mod_base = OTHER; note = 2'-O-methyluridine with phosphorothioate linkage
  modified_base 2: mod_base = OTHER; note = 2'-O-methylcytidine with phosphorothioate linkage
  modified_base 3: mod_base = OTHER; note = 2'-O-methyluridine
  modified_base 4: mod_base = OTHER; note = 2'-O-methylguanosine
  modified_base 5: mod_base = OTHER; note = 2'-O-methyluridine
  modified_base 6: mod_base = OTHER; note = 2'-O-methylguanosine
  modified_base 7: mod_base = OTHER; note = 2'-fluoroadenosine
  modified_base 8: mod_base = OTHER; note = 2'-O-methyluridine
  modified_base 9: mod_base = OTHER; note = 2'-fluorocytidine
  modified_base 10: mod_base = OTHER; note = 2'-fluoroadenosine
  modified_base 11: mod_base = OTHER; note = 2'-fluorocytidine
  modified_base 12: mod_base = OTHER; note = 2'-O-methyladenosine
  modified_base 13: mod_base = OTHER; note = 2'-O-methyladenosine
  modified_base 14: mod_base = OTHER; note = 2'-O-methylguanosine
  modified_base 15: mod_base = OTHER; note = 2'-O-methylcytidine
  modified_base 16: mod_base = OTHER; note = 2'-O-methylguanosine
  modified_base 17: mod_base = OTHER; note = 2'-O-methylguanosine
  modified_base 18: mod_base = OTHER; note = 2'-O-methyladenosine
  modified_base 19: mod_base = OTHER; note = 2'-O-methylcytidine
  modified_base 20: mod_base = OTHER; note = 2'-O-methylcytidine
  modified_base 21: mod_base = OTHER; note = 2'-O-methyladenosine
tctgtgatcacaagcggacca

SEQ ID NO: 801 - RNA, 21 nt, synthetic construct
  source 1..21: mol_type = other RNA
  modified_base 1: mod_base = OTHER; note = 2'-O-methylcytidine with phosphorothioate linkage
  modified_base 2: mod_base = OTHER; note = 2'-O-methyluridine with phosphorothioate linkage
  modified_base 3: mod_base = OTHER; note = 2'-O-methylguanosine
  modified_base 4: mod_base = OTHER; note = 2'-O-methyluridine
  modified_base 5: mod_base = OTHER; note = 2'-O-methylguanosine
  modified_base 6: mod_base = OTHER; note = 2'-O-methyladenosine
  modified_base 7: mod_base = OTHER; note = 2'-fluorouridine
  modified_base 8: mod_base = OTHER; note = 2'-O-methylcytidine
  modified_base 9: mod_base = OTHER; note = 2'-fluoroadenosine
  modified_base 10: mod_base = OTHER; note = 2'-fluorocytidine
  modified_base 11: mod_base = OTHER; note = 2'-fluoroadenosine
  modified_base 12: mod_base = OTHER; note = 2'-O-methyladenosine
  modified_base 13: mod_base = OTHER; note = 2'-O-methylguanosine
  modified_base 14: mod_base = OTHER; note = 2'-O-methylcytidine
  modified_base 15: mod_base = OTHER; note = 2'-O-methylguanosine
  modified_base 16: mod_base = OTHER; note = 2'-O-methylguanosine
  modified_base 17: mod_base = OTHER; note = 2'-O-methyladenosine
  modified_base 18: mod_base = OTHER; note = 2'-O-methylcytidine
  modified_base 19: mod_base = OTHER; note = 2'-O-methylcytidine
  modified_base 20: mod_base = OTHER; note = 2'-O-methyladenosine
  modified_base 21: mod_base = OTHER; note = 2'-O-methyladenosine
ctgtgatcacaagcggaccaa

SEQ ID NO: 802 - RNA, 21 nt, synthetic construct
  source 1..21: mol_type = other RNA
  modified_base 1: mod_base = OTHER; note = 2'-O-methyluridine with phosphorothioate linkage
  modified_base 2: mod_base = OTHER; note = 2'-O-methylguanosine with phosphorothioate linkage
  modified_base 3: mod_base = OTHER; note = 2'-O-methyluridine
  modified_base 4: mod_base = OTHER; note = 2'-O-methylguanosine
  modified_base 5: mod_base = OTHER; note = 2'-O-methyladenosine
  modified_base 6: mod_base = OTHER; note = 2'-O-methyluridine
  modified_base 7: mod_base = OTHER; note = 2'-fluorocytidine
  modified_base 8: mod_base = OTHER; note = 2'-O-methyladenosine
  modified_base 9: mod_base = OTHER; note = 2'-fluorocytidine
  modified_base 10: mod_base = OTHER; note = 2'-fluoroadenosine
  modified_base 11: mod_base = OTHER; note = 2'-fluoroadenosine
  modified_base 12: mod_base = OTHER; note = 2'-O-methylguanosine
  modified_base 13: mod_base = OTHER; note = 2'-O-methylcytidine
  modified_base 14: mod_base = OTHER; note = 2'-O-methylguanosine
  modified_base 15: mod_base = OTHER; note = 2'-O-methylguanosine
  modified_base 16: mod_base = OTHER; note = 2'-O-methyladenosine
  modified_base 17: mod_base = OTHER; note = 2'-O-methylcytidine
  modified_base 18: mod_base = OTHER; note = 2'-O-methylcytidine
  modified_base 19: mod_base = OTHER; note = 2'-O-methyladenosine
  modified_base 20: mod_base = OTHER; note = 2'-O-methyluridine
  modified_base 21: mod_base = OTHER; note = 2'-O-methyladenosine
tgtgatcacaagcggaccata

SEQ ID NO: 803 - RNA, 21 nt, synthetic construct
  source 1..21: mol_type = other RNA
  modified_base 1: mod_base = OTHER; note = 2'-O-methylguanosine with phosphorothioate linkage
  modified_base 2: mod_base = OTHER; note = 2'-O-methyluridine with phosphorothioate linkage
  modified_base 3: mod_base = OTHER; note = 2'-O-methylguanosine
  modified_base 4: mod_base = OTHER; note = 2'-O-methyladenosine
  modified_base 5: mod_base = OTHER; note = 2'-O-methyluridine
  modified_base 6: mod_base = OTHER; note = 2'-O-methylcytidine
  modified_base 7: mod_base = OTHER; note = 2'-fluoroadenosine
  modified_base 8: mod_base = OTHER; note = 2'-O-methylcytidine
  modified_base 9: mod_base = OTHER; note = 2'-fluoroadenosine
  modified_base 10: mod_base = OTHER; note = 2'-fluoroadenosine
  modified_base 11: mod_base = OTHER; note = 2'-fluoroguanosine
  modified_base 12: mod_base = OTHER; note = 2'-O-methylcytidine
  modified_base 13: mod_base = OTHER; note = 2'-O-methylguanosine
  modified_base 14: mod_base = OTHER; note = 2'-O-methylguanosine
  modified_base 15: mod_base = OTHER; note = 2'-O-methyladenosine
  modified_base 16: mod_base = OTHER; note = 2'-O-methylcytidine
  modified_base 17: mod_base = OTHER; note = 2'-O-methylcytidine
  modified_base 18: mod_base = OTHER; note = 2'-O-methyladenosine
  modified_base 19: mod_base = OTHER; note = 2'-O-methyluridine
  modified_base 20: mod_base = OTHER; note = 2'-O-methylcytidine
  modified_base 21: mod_base = OTHER; note = 2'-O-methyladenosine
gtgatcacaagcggaccatca

SEQ ID NO: 804 - RNA, 21 nt, synthetic construct
  source 1..21: mol_type = other RNA
  modified_base 1: mod_base = OTHER; note = 2'-O-methyladenosine with phosphorothioate linkage
  modified_base 2: mod_base = OTHER; note = 2'-O-methylguanosine with phosphorothioate linkage
  modified_base 3: mod_base = OTHER; note = 2'-O-methylguanosine
  modified_base 4: mod_base = OTHER; note = 2'-O-methyladenosine
  modified_base 5: mod_base = OTHER; note = 2'-O-methylguanosine
  modified_base 6: mod_base = OTHER; note = 2'-O-methylcytidine
  modified_base 7: mod_base = OTHER; note = 2'-fluorouridine
  modified_base 8: mod_base = OTHER; note = 2'-O-methylguanosine
  modified_base 9: mod_base = OTHER; note = 2'-fluorocytidine
  modified_base 10: mod_base = OTHER; note = 2'-fluorouridine
  modified_base 11: mod_base = OTHER; note = 2'-fluoroadenosine
  modified_base 12: mod_base = OTHER; note = 2'-O-methylguanosine
  modified_base 13: mod_base = OTHER; note = 2'-O-methylcytidine
  modified_base 14: mod_base = OTHER; note = 2'-O-methylcytidine
  modified_base 15: mod_base = OTHER; note = 2'-O-methyladenosine
  modified_base 16: mod_base = OTHER; note = 2'-O-methyladenosine
  modified_base 17: mod_base = OTHER; note = 2'-O-methyladenosine
  modified_base 18: mod_base = OTHER; note = 2'-O-methylguanosine
  modified_base 19: mod_base = OTHER; note = 2'-O-methylcytidine
  modified_base 20: mod_base = OTHER; note = 2'-O-methyladenosine
  modified_base 21: mod_base = OTHER; note = 2'-O-methyladenosine
aggagctgctagccaaagcaa

SEQ ID NO: 805 - RNA, 21 nt, synthetic construct
  source 1..21: mol_type = other RNA
  modified_base 1: mod_base = OTHER; note = 2'-O-methyladenosine with phosphorothioate linkage
  modified_base 2: mod_base = OTHER; note = 2'-O-methylguanosine with phosphorothioate linkage
  modified_base 3: mod_base = OTHER; note = 2'-O-methylcytidine
  modified_base 4: mod_base = OTHER; note = 2'-O-methyluridine
  modified_base 5: mod_base = OTHER; note = 2'-O-methylguanosine
  modified_base 6: mod_base = OTHER; note = 2'-O-methylcytidine
  modified_base 7: mod_base = OTHER; note = 2'-fluorouridine
  modified_base 8: mod_base = OTHER; note = 2'-O-methyladenosine
  modified_base 9: mod_base = OTHER; note = 2'-fluoroguanosine
  modified_base 10: mod_base = OTHER; note = 2'-fluorocytidine
  modified_base 11: mod_base = OTHER; note = 2'-fluorocytidine
  modified_base 12: mod_base = OTHER; note = 2'-O-methyladenosine
  modified_base 13: mod_base = OTHER; note = 2'-O-methyladenosine
  modified_base 14: mod_base = OTHER; note = 2'-O-methyladenosine
  modified_base 15: mod_base = OTHER; note = 2'-O-methylguanosine
  modified_base 16: mod_base = OTHER; note = 2'-O-methylcytidine
  modified_base 17: mod_base = OTHER; note = 2'-O-methyladenosine
  modified_base 18: mod_base = OTHER; note = 2'-O-methyluridine
  modified_base 19: mod_base = OTHER; note = 2'-O-methyluridine
  modified_base 20: mod_base = OTHER; note = 2'-O-methylguanosine
  modified_base 21: mod_base = OTHER; note = 2'-O-methyladenosine
agctgctagccaaagcattga

SEQ ID NO: 806 - RNA, 21 nt, synthetic construct
  source 1..21: mol_type = other RNA
  modified_base 1: mod_base = OTHER; note = 2'-O-methylcytidine with phosphorothioate linkage
  modified_base 2: mod_base = OTHER; note = 2'-O-methyluridine with phosphorothioate linkage
  modified_base 3: mod_base = OTHER; note = 2'-O-methylguanosine
  modified_base 4: mod_base = OTHER; note = 2'-O-methylcytidine
  modified_base 5: mod_base = OTHER; note = 2'-O-methyluridine
  modified_base 6: mod_base = OTHER; note = 2'-O-methyladenosine
  modified_base 7: mod_base = OTHER; note = 2'-fluoroguanosine
  modified_base 8: mod_base = OTHER; note = 2'-O-methylcytidine
  modified_base 9: mod_base = OTHER; note = 2'-fluorocytidine
  modified_base 10: mod_base = OTHER; note = 2'-fluoroadenosine
  modified_base 11: mod_base = OTHER; note = 2'-fluoroadenosine
  modified_base 12: mod_base = OTHER; note = 2'-O-methyladenosine
  modified_base 13: mod_base = OTHER; note = 2'-O-methylguanosine
  modified_base 14: mod_base = OTHER; note = 2'-O-methylcytidine
  modified_base 15: mod_base = OTHER; note = 2'-O-methyladenosine
  modified_base 16: mod_base = OTHER; note = 2'-O-methyluridine
  modified_base 17: mod_base = OTHER; note = 2'-O-methyluridine
  modified_base 18: mod_base = OTHER; note = 2'-O-methylguanosine
  modified_base 19: mod_base = OTHER; note = 2'-O-methylguanosine
  modified_base 20: mod_base = OTHER; note = 2'-O-methyladenosine
  modified_base 21: mod_base = OTHER; note = 2'-O-methyladenosine
ctgctagccaaagcattggaa

SEQ ID NO: 807 - RNA, 21 nt, synthetic construct
  source 1..21: mol_type = other RNA
  modified_base 1: mod_base = OTHER; note = 2'-O-methyluridine with phosphorothioate linkage
  modified_base 2: mod_base = OTHER; note = 2'-O-methylguanosine with phosphorothioate linkage
  modified_base 3: mod_base = OTHER; note = 2'-O-methylcytidine
  modified_base 4: mod_base = OTHER; note = 2'-O-methyluridine
  modified_base 5: mod_base = OTHER; note = 2'-O-methyladenosine
  modified_base 6: mod_base = OTHER; note = 2'-O-methylguanosine
  modified_base 7: mod_base = OTHER; note = 2'-fluorocytidine
  modified_base 8: mod_base = OTHER; note = 2'-O-methylcytidine
  modified_base 9: mod_base = OTHER; note = 2'-fluoroadenosine
  modified_base 10: mod_base = OTHER; note = 2'-fluoroadenosine
  modified_base 11: mod_base = OTHER; note = 2'-fluoroadenosine
  modified_base 12: mod_base = OTHER; note = 2'-O-methylguanosine
  modified_base 13: mod_base = OTHER; note = 2'-O-methylcytidine
  modified_base 14: mod_base = OTHER; note = 2'-O-methyladenosine
  modified_base 15: mod_base = OTHER; note = 2'-O-methyluridine
  modified_base 16: mod_base = OTHER; note = 2'-O-methyluridine
  modified_base 17: mod_base = OTHER; note = 2'-O-methylguanosine
  modified_base 18: mod_base = OTHER; note = 2'-O-methylguanosine
  modified_base 19: mod_base = OTHER; note = 2'-O-methyladenosine
  modified_base 20: mod_base = OTHER; note = 2'-O-methylguanosine
  modified_base 21: mod_base = OTHER; note = 2'-O-methyladenosine
tgctagccaaagcattggaga

SEQ ID NO: 808 - RNA, 21 nt, synthetic construct
  source 1..21: mol_type = other RNA
  modified_base 1: mod_base = OTHER; note = 2'-O-methylcytidine with phosphorothioate linkage
  modified_base 2: mod_base = OTHER; note = 2'-O-methyluridine with phosphorothioate linkage
  modified_base 3: mod_base = OTHER; note = 2'-O-methyladenosine
  modified_base 4: mod_base = OTHER; note = 2'-O-methylguanosine
  modified_base 5: mod_base = OTHER; note = 2'-O-methylcytidine
  modified_base 6: mod_base = OTHER; note = 2'-O-methylcytidine
  modified_base 7: mod_base = OTHER; note = 2'-fluoroadenosine
  modified_base 8: mod_base = OTHER; note = 2'-O-methyladenosine
  modified_base 9: mod_base = OTHER; note = 2'-fluoroadenosine
  modified_base 10: mod_base = OTHER; note = 2'-fluoroguanosine
  modified_base 11: mod_base = OTHER; note = 2'-fluorocytidine
  modified_base 12: mod_base = OTHER; note = 2'-O-methyladenosine
  modified_base 13: mod_base = OTHER; note = 2'-O-methyluridine
  modified_base 14: mod_base = OTHER; note = 2'-O-methyluridine
  modified_base 15: mod_base = OTHER; note = 2'-O-methylguanosine
  modified_base 16: mod_base = OTHER; note = 2'-O-methylguanosine
  modified_base 17: mod_base = OTHER; note = 2'-O-methyladenosine
  modified_base 18: mod_base = OTHER; note = 2'-O-methylguanosine
  modified_base 19: mod_base = OTHER; note = 2'-O-methyladenosine
  modified_base 20: mod_base = OTHER; note = 2'-O-methylcytidine
  modified_base 21: mod_base = OTHER; note = 2'-O-methyladenosine
ctagccaaagcattggagaca

SEQ ID NO: 809 - RNA, 21 nt, synthetic construct
  source 1..21: mol_type = other RNA
  modified_base 1: mod_base = OTHER; note = 2'-O-methyluridine with phosphorothioate linkage
  modified_base 2: mod_base = OTHER; note = 2'-O-methyladenosine with phosphorothioate linkage
  modified_base 3: mod_base = OTHER; note = 2'-O-methylguanosine
  modified_base 4: mod_base = OTHER; note = 2'-O-methylcytidine
  modified_base 5: mod_base = OTHER; note = 2'-O-methylcytidine
  modified_base 6: mod_base = OTHER; note = 2'-O-methyladenosine
  modified_base 7: mod_base = OTHER; note = 2'-fluoroadenosine
  modified_base 8: mod_base = OTHER; note = 2'-O-methyladenosine
  modified_base 9: mod_base = OTHER; note = 2'-fluoroguanosine
  modified_base 10: mod_base = OTHER; note = 2'-fluorocytidine
  modified_base 11: mod_base = OTHER; note = 2'-fluoroadenosine
  modified_base 12: mod_base = OTHER; note = 2'-O-methyluridine
  modified_base 13: mod_base = OTHER; note = 2'-O-methyluridine
  modified_base 14: mod_base = OTHER; note = 2'-O-methylguanosine
  modified_base 15: mod_base = OTHER; note = 2'-O-methylguanosine
  modified_base 16: mod_base = OTHER; note = 2'-O-methyladenosine
  modified_base 17: mod_base = OTHER; note = 2'-O-methylguanosine
  modified_base 18: mod_base = OTHER; note = 2'-O-methyladenosine
  modified_base 19: mod_base = OTHER; note = 2'-O-methylcytidine
  modified_base 20: mod_base = OTHER; note = 2'-O-methylcytidine
  modified_base 21: mod_base = OTHER; note = 2'-O-methyladenosine
tagccaaagcattggagacca

SEQ ID NO: 810 - RNA, 21 nt, synthetic construct
  source 1..21: mol_type = other RNA
  modified_base 1: mod_base = OTHER; note = 2'-O-methylguanosine with phosphorothioate linkage
  modified_base 2: mod_base = OTHER; note = 2'-O-methylguanosine with phosphorothioate linkage
  modified_base 3: mod_base = OTHER; note = 2'-O-methyladenosine
  modified_base 4: mod_base = OTHER; note = 2'-O-methylguanosine
  modified_base 5: mod_base = OTHER; note = 2'-O-methylcytidine
  modified_base 6: mod_base = OTHER; note = 2'-O-methyluridine
  modified_base 7: mod_base = OTHER; note = 2'-fluorocytidine
  modified_base 8: mod_base = OTHER; note = 2'-O-methylcytidine
  modified_base 9: mod_base = OTHER; note = 2'-fluorouridine
  modified_base 10: mod_base = OTHER; note = 2'-fluorouridine
  modified_base 11: mod_base = OTHER; note = 2'-fluorocytidine
  modified_base 12: mod_base = OTHER; note = 2'-O-methylguanosine
  modified_base 13: mod_base = OTHER; note = 2'-O-methyluridine
  modified_base 14: mod_base = OTHER; note = 2'-O-methyluridine
  modified_base 15: mod_base = OTHER; note = 2'-O-methylguanosine
  modified_base 16: mod_base = OTHER; note = 2'-O-methylguanosine
  modified_base 17: mod_base = OTHER; note = 2'-O-methyladenosine
  modified_base 18: mod_base = OTHER; note = 2'-O-methylcytidine
  modified_base 19: mod_base = OTHER; note = 2'-O-methylcytidine
  modified_base 20: mod_base = OTHER; note = 2'-O-methyluridine
  modified_base 21: mod_base = OTHER; note = 2'-O-methyladenosine
ggagctccttcgttggaccta

SEQ ID NO: 811 - RNA, 21 nt, synthetic construct
  source 1..21: mol_type = other RNA
  modified_base 1: mod_base = OTHER; note = 2'-O-methylguanosine with phosphorothioate linkage
  modified_base 2: mod_base = OTHER; note = 2'-O-methyladenosine with phosphorothioate linkage
  modified_base 3: mod_base = OTHER; note = 2'-O-methylguanosine
  modified_base 4: mod_base = OTHER; note = 2'-O-methylcytidine
  modified_base 5: mod_base = OTHER; note = 2'-O-methyluridine
  modified_base 6: mod_base = OTHER; note = 2'-O-methylcytidine
  modified_base 7: mod_base = OTHER; note = 2'-fluorocytidine
  modified_base 8: mod_base = OTHER; note = 2'-O-methyluridine
  modified_base 9: mod_base = OTHER; note = 2'-fluorouridine
  modified_base 10: mod_base = OTHER; note = 2'-fluorocytidine
  modified_base 11: mod_base = OTHER; note = 2'-fluoroguanosine
  modified_base 12: mod_base = OTHER; note = 2'-O-methyluridine
  modified_base 13: mod_base = OTHER; note = 2'-O-methyluridine
  modified_base 14: mod_base = OTHER; note = 2'-O-methylguanosine
  modified_base 15: mod_base = OTHER; note = 2'-O-methylguanosine
  modified_base 16: mod_base = OTHER; note = 2'-O-methyladenosine
  modified_base 17: mod_base = OTHER; note = 2'-O-methylcytidine
  modified_base 18: mod_base = OTHER; note = 2'-O-methylcytidine
  modified_base 19: mod_base = OTHER; note = 2'-O-methyluridine
  modified_base 20: mod_base = OTHER; note = 2'-O-methylcytidine
  modified_base 21: mod_base = OTHER; note = 2'-O-methyladenosine
gagctccttcgttggacctca

SEQ ID NO: 812 - RNA, 21 nt, synthetic construct
  source 1..21: mol_type = other RNA
  modified_base 1: mod_base = OTHER; note = 2'-O-methyladenosine with phosphorothioate linkage
  modified_base 2: mod_base = OTHER; note = 2'-O-methylguanosine with phosphorothioate linkage
  modified_base 3: mod_base = OTHER; note = 2'-O-methylcytidine
  modified_base 4: mod_base = OTHER; note = 2'-O-methyluridine
  modified_base 5: mod_base = OTHER; note = 2'-O-methylcytidine
  modified_base 6: mod_base = OTHER; note = 2'-O-methylcytidine
  modified_base 7: mod_base = OTHER; note = 2'-fluorouridine
  modified_base 8: mod_base = OTHER; note = 2'-O-methyluridine
  modified_base 9: mod_base = OTHER; note = 2'-fluorocytidine
  modified_base 10: mod_base = OTHER; note = 2'-fluoroguanosine
  modified_base 11: mod_base = OTHER; note = 2'-fluorouridine
  modified_base 12: mod_base = OTHER; note = 2'-O-methyluridine
  modified_base 13: mod_base = OTHER; note = 2'-O-methylguanosine
  modified_base 14: mod_base = OTHER; note = 2'-O-methylguanosine
  modified_base 15: mod_base = OTHER; note = 2'-O-methyladenosine
  modified_base 16: mod_base = OTHER; note = 2'-O-methylcytidine
  modified_base 17: mod_base = OTHER; note = 2'-O-methylcytidine
  modified_base 18: mod_base = OTHER; note = 2'-O-methyluridine
  modified_base 19: mod_base = OTHER; note = 2'-O-methylcytidine
  modified_base 20: mod_base = OTHER; note = 2'-O-methylcytidine
  modified_base 21: mod_base = OTHER; note = 2'-O-methyladenosine
agctccttcgttggacctcca

SEQ ID NO: 813 - RNA, 21 nt, synthetic construct
  source 1..21: mol_type = other RNA
  modified_base 1: mod_base = OTHER; note = 2'-O-methyladenosine with phosphorothioate linkage
  modified_base 2: mod_base = OTHER; note = 2'-O-methylguanosine with phosphorothioate linkage
  modified_base 3: mod_base = OTHER; note = 2'-O-methylguanosine
  modified_base 4: mod_base = OTHER; note = 2'-O-methylcytidine
  modified_base 5: mod_base = OTHER; note = 2'-O-methylcytidine
  modified_base 6: mod_base = OTHER; note = 2'-O-methyluridine
  modified_base 7: mod_base = OTHER; note = 2'-fluoroguanosine
  modified_base 8: mod_base = OTHER; note = 2'-O-methylguanosine
  modified_base 9: mod_base = OTHER; note = 2'-fluoroguanosine
  modified_base 10: mod_base = OTHER; note = 2'-fluorocytidine
  modified_base 11: mod_base = OTHER; note = 2'-fluorocytidine
  modified_base 12: mod_base = OTHER; note = 2'-O-methyladenosine
  modified_base 13: mod_base = OTHER; note = 2'-O-methyluridine
  modified_base 14: mod_base = OTHER; note = 2'-O-methyladenosine
  modified_base 15: mod_base = OTHER; note = 2'-O-methyluridine
  modified_base 16: mod_base = OTHER; note = 2'-O-methylguanosine
  modified_base 17: mod_base = OTHER; note = 2'-O-methyluridine
  modified_base 18: mod_base = OTHER; note = 2'-O-methyluridine
  modified_base 19: mod_base = OTHER; note = 2'-O-methylguanosine
  modified_base 20: mod_base = OTHER; note = 2'-O-methylcytidine
  modified_base 21: mod_base = OTHER; note = 2'-O-methyladenosine
aggcctgggccatatgttgca

SEQ ID NO: 814 - RNA, 21 nt, synthetic construct
  source 1..21: mol_type = other RNA
  modified_base 1: mod_base = OTHER; note = 2'-O-methylguanosine with phosphorothioate linkage
  modified_base 2: mod_base = OTHER; note = 2'-O-methylcytidine with phosphorothioate linkage
  modified_base 3: mod_base = OTHER; note = 2'-O-methylcytidine
  modified_base 4: mod_base = OTHER; note = 2'-O-methyluridine
  modified_base 5: mod_base = OTHER; note = 2'-O-methylguanosine
  modified_base 6: mod_base = OTHER; note = 2'-O-methylguanosine
  modified_base 7: mod_base = OTHER; note = 2'-fluoroguanosine
  modified_base 8: mod_base = OTHER; note = 2'-O-methylcytidine
  modified_base 9: mod_base = OTHER; note = 2'-fluorocytidine
  modified_base 10: mod_base = OTHER; note = 2'-fluoroadenosine
  modified_base 11: mod_base = OTHER; note = 2'-fluorouridine
  modified_base 12: mod_base = OTHER; note = 2'-O-methyladenosine
  modified_base 13: mod_base = OTHER; note = 2'-O-methyluridine
  modified_base 14: mod_base = OTHER; note = 2'-O-methylguanosine
  modified_base 15: mod_base = OTHER; note = 2'-O-methyluridine
  modified_base 16: mod_base = OTHER; note = 2'-O-methyluridine
  modified_base 17: mod_base = OTHER; note = 2'-O-methylguanosine
  modified_base 18: mod_base = OTHER; note = 2'-O-methylcytidine
  modified_base 19: mod_base = OTHER; note = 2'-O-methyluridine
  modified_base 20: mod_base = OTHER; note = 2'-O-methylguanosine
  modified_base 21: mod_base = OTHER; note = 2'-O-methyladenosine
gcctgggccatatgttgctga

SEQ ID NO: 815 - RNA, 21 nt, synthetic construct
  source 1..21: mol_type = other RNA
  modified_base 1: mod_base = OTHER; note = 2'-O-methylcytidine with phosphorothioate linkage
  modified_base 2: mod_base = OTHER; note = 2'-O-methyluridine with phosphorothioate linkage
  modified_base 3: mod_base = OTHER; note = 2'-O-methylguanosine
  modified_base 4: mod_base = OTHER; note = 2'-O-methylguanosine
  modified_base 5: mod_base = OTHER; note = 2'-O-methylguanosine
  modified_base 6: mod_base = OTHER; note = 2'-O-methylcytidine
  modified_base 7: mod_base = OTHER; note = 2'-fluorocytidine
  modified_base 8: mod_base = OTHER; note = 2'-O-methyladenosine
  modified_base 9: mod_base = OTHER; note = 2'-fluorouridine
  modified_base 10: mod_base = OTHER; note = 2'-fluoroadenosine
  modified_base 11: mod_base = OTHER; note = 2'-fluorouridine
  modified_base 12: mod_base = OTHER; note = 2'-O-methylguanosine
  modified_base 13: mod_base = OTHER; note = 2'-O-methyluridine
  modified_base 14: mod_base = OTHER; note = 2'-O-methyluridine
  modified_base 15: mod_base = OTHER; note = 2'-O-methylguanosine
  modified_base 16: mod_base = OTHER; note = 2'-O-methylcytidine
  modified_base 17: mod_base = OTHER; note = 2'-O-methyluridine
  modified_base 18: mod_base = OTHER; note = 2'-O-methylguanosine
  modified_base 19: mod_base = OTHER; note = 2'-O-methylguanosine
  modified_base 20: mod_base = OTHER; note = 2'-O-methylguanosine
  modified_base 21: mod_base = OTHER; note = 2'-O-methyladenosine
ctgggccatatgttgctggga

SEQ ID NO: 816 - RNA, 21 nt, synthetic construct
  source 1..21: mol_type = other RNA
  modified_base 1: mod_base = OTHER; note = 2'-O-methyluridine with phosphorothioate linkage
  modified_base 2: mod_base = OTHER; note = 2'-O-methylguanosine with phosphorothioate linkage
  modified_base 3: mod_base = OTHER; note = 2'-O-methylguanosine
  modified_base 4: mod_base = OTHER; note = 2'-O-methylguanosine
  modified_base 5: mod_base = OTHER; note = 2'-O-methylcytidine
  modified_base 6: mod_base = OTHER; note = 2'-O-methylcytidine
  modified_base 7: mod_base = OTHER; note = 2'-fluoroadenosine
  modified_base 8: mod_base = OTHER; note = 2'-O-methyluridine
  modified_base 9: mod_base = OTHER; note = 2'-fluoroadenosine
  modified_base 10: mod_base = OTHER; note = 2'-fluorouridine
  modified_base 11: mod_base = OTHER; note = 2'-fluoroguanosine
  modified_base 12: mod_base = OTHER; note = 2'-O-methyluridine
  modified_base 13: mod_base = OTHER; note = 2'-O-methyluridine
  modified_base 14: mod_base = OTHER; note = 2'-O-methylguanosine
  modified_base 15: mod_base = OTHER; note = 2'-O-methylcytidine
  modified_base 16: mod_base = OTHER; note = 2'-O-methyluridine
  modified_base 17: mod_base = OTHER; note = 2'-O-methylguanosine
  modified_base 18: mod_base = OTHER; note = 2'-O-methylguanosine
  modified_base 19: mod_base = OTHER; note = 2'-O-methylguanosine
  modified_base 20: mod_base = OTHER; note = 2'-O-methyladenosine
  modified_base 21: mod_base = OTHER; note = 2'-O-methyladenosine
tgggccatatgttgctgggaa

SEQ ID NO: 817 - RNA, 21 nt, synthetic construct
  source 1..21: mol_type = other RNA
  modified_base 1: mod_base = OTHER; note = 2'-O-methyladenosine with phosphorothioate linkage
  modified_base 2: mod_base = OTHER; note = 2'-O-methyluridine with phosphorothioate linkage
  modified_base 3: mod_base = OTHER; note = 2'-O-methylguanosine
  modified_base 4: mod_base = OTHER; note = 2'-O-methyluridine
  modified_base 5: mod_base = OTHER; note = 2'-O-methyluridine
  modified_base 6: mod_base = OTHER; note = 2'-O-methylguanosine
  modified_base 7: mod_base = OTHER; note = 2'-fluorocytidine
  modified_base 8: mod_base = OTHER; note = 2'-O-methyluridine
  modified_base 9: mod_base = OTHER; note = 2'-fluoroguanosine
  modified_base 10: mod_base = OTHER; note = 2'-fluoroguanosine
  modified_base 11: mod_base = OTHER; note = 2'-fluoroguanosine
  modified_base 12: mod_base = OTHER; note = 2'-O-methyladenosine
  modified_base 13: mod_base = OTHER; note = 2'-O-methyladenosine
  modified_base 14: mod_base = OTHER; note = 2'-O-methyluridine
  modified_base 15: mod_base = OTHER; note = 2'-O-methyluridine
  modified_base 16: mod_base = OTHER; note = 2'-O-methyluridine
  modified_base 17: mod_base = OTHER; note = 2'-O-methylcytidine
  modified_base 18: mod_base = OTHER; note = 2'-O-methylcytidine
  modified_base 19: mod_base = OTHER; note = 2'-O-methyluridine
  modified_base 20: mod_base = OTHER; note = 2'-O-methylcytidine
  modified_base 21: mod_base = OTHER; note = 2'-O-methyladenosine
atgttgctgggaatttcctca

SEQ ID NO: 818 - RNA, 21 nt, synthetic construct
  source 1..21: mol_type = other RNA
  modified_base 1: mod_base = OTHER; note = 2'-O-methylcytidine with phosphorothioate linkage
  modified_base 2: mod_base = OTHER; note = 2'-O-methyluridine with phosphorothioate linkage
  modified_base 3: mod_base = OTHER; note = 2'-O-methylguanosine
  modified_base 4: mod_base = OTHER; note = 2'-O-methylguanosine
  modified_base 5: mod_base = OTHER; note = 2'-O-methylguanosine
  modified_base 6: mod_base = OTHER; note = 2'-O-methyladenosine
  modified_base 7: mod_base = OTHER; note = 2'-fluoroadenosine
  modified_base 8: mod_base = OTHER; note = 2'-O-methyluridine
  modified_base 9: mod_base = OTHER; note = 2'-fluorouridine
  modified_base 10: mod_base = OTHER; note = 2'-fluorouridine
  modified_base 11: mod_base = OTHER; note = 2'-fluorocytidine
  modified_base 12: mod_base = OTHER; note = 2'-O-methylcytidine
  modified_base 13: mod_base = OTHER; note = 2'-O-methyluridine
  modified_base 14: mod_base = OTHER; note = 2'-O-methylcytidine
  modified_base 15: mod_base = OTHER; note = 2'-O-methylcytidine
  modified_base 16: mod_base = OTHER; note = 2'-O-methyladenosine
  modified_base 17: mod_base = OTHER; note = 2'-O-methylcytidine
  modified_base 18: mod_base = OTHER; note = 2'-O-methylcytidine
  modified_base 19: mod_base = OTHER; note = 2'-O-methylcytidine
  modified_base 20: mod_base = OTHER; note = 2'-O-methyluridine
  modified_base 21: mod_base = OTHER; note = 2'-O-methyladenosine
ctgggaatttcctccacccta

SEQ ID NO: 819 - RNA, 21 nt, synthetic construct
  source 1..21: mol_type = other RNA
  modified_base 1: mod_base = OTHER; note = 2'-O-methyluridine with phosphorothioate linkage
  modified_base 2: mod_base = OTHER; note = 2'-O-methyluridine with phosphorothioate linkage
  modified_base 3: mod_base = OTHER; note = 2'-O-methylcytidine
  modified_base 4: mod_base = OTHER; note = 2'-O-methylcytidine
  modified_base 5: mod_base = OTHER; note = 2'-O-methyluridine
  modified_base 6: mod_base = OTHER; note = 2'-O-methylcytidine
  modified_base 7: mod_base = OTHER; note = 2'-fluorocytidine
  modified_base 8: mod_base = OTHER; note = 2'-O-methyladenosine
  modified_base 9: mod_base = OTHER; note = 2'-fluorocytidine
  modified_base 10: mod_base = OTHER; note = 2'-fluorocytidine
  modified_base 11: mod_base = OTHER; note = 2'-fluorocytidine
  modified_base 12: mod_base = OTHER; note = 2'-O-methyluridine
  modified_base 13: mod_base = OTHER; note = 2'-O-methyluridine
  modified_base 14: mod_base = OTHER; note = 2'-O-methylcytidine
  modified_base 15: mod_base = OTHER; note = 2'-O-methylguanosine
  modified_base 16: mod_base = OTHER; note = 2'-O-methyluridine
  modified_base 17: mod_base = OTHER; note = 2'-O-methylcytidine
  modified_base 18: mod_base = OTHER; note = 2'-O-methyladenosine
  modified_base 19: mod_base = OTHER; note = 2'-O-methyluridine
  modified_base 20: mod_base = OTHER; note = 2'-O-methylguanosine
  modified_base 21: mod_base = OTHER; note = 2'-O-methyladenosine
ttcctccacccttcgtcatga

SEQ ID NO: 820 - RNA, 21 nt, synthetic construct
  source 1..21: mol_type = other RNA
  modified_base 1: mod_base = OTHER; note = 2'-O-methyladenosine with phosphorothioate linkage
  modified_base 2: mod_base = OTHER; note = 2'-O-methyladenosine with phosphorothioate linkage
  modified_base 3: mod_base = OTHER; note = 2'-O-methylguanosine
  modified_base 4: mod_base = OTHER; note = 2'-O-methylguanosine
  modified_base 5: mod_base = OTHER; note = 2'-O-methylguanosine
  modified_base 6: mod_base = OTHER; note = 2'-O-methylcytidine
  modified_base 7: mod_base = OTHER; note = 2'-fluorocytidine
  modified_base 8: mod_base = OTHER; note = 2'-O-methylguanosine
  modified_base 9: mod_base = OTHER; note = 2'-fluorocytidine
  modified_base 10: mod_base = OTHER; note = 2'-fluorocytidine
  modified_base 11: mod_base = OTHER; note = 2'-fluorouridine
  modified_base 12: mod_base = OTHER; note = 2'-O-methylcytidine
  modified_base 13: mod_base = OTHER; note = 2'-O-methylcytidine
  modified_base 14: mod_base = OTHER; note = 2'-O-methyladenosine
  modified_base 15: mod_base = OTHER; note = 2'-O-methyluridine
  modified_base 16: mod_base = OTHER; note = 2'-O-methyluridine
  modified_base 17: mod_base = OTHER; note = 2'-O-methylcytidine
  modified_base 18: mod_base = OTHER; note = 2'-O-methylcytidine
  modified_base 19: mod_base = OTHER; note = 2'-O-methyluridine
  modified_base 20: mod_base = OTHER; note = 2'-O-methyladenosine
  modified_base 21: mod_base = OTHER; note = 2'-O-methyladenosine
aagggccgcctccattcctaa

SEQ ID NO: 821 - RNA, 21 nt, synthetic construct
  source 1..21: mol_type = other RNA
  modified_base 1: mod_base = OTHER; note = 2'-O-methylguanosine with phosphorothioate linkage
  modified_base 2: mod_base = OTHER; note = 2'-O-methylguanosine with phosphorothioate linkage
  modified_base 3: mod_base = OTHER; note = 2'-O-methylcytidine
  modified_base 4: mod_base = OTHER; note = 2'-O-methylcytidine
  modified_base 5: mod_base = OTHER; note = 2'-O-methylguanosine
  modified_base 6: mod_base = OTHER; note = 2'-O-methylcytidine
  modified_base 7: mod_base = OTHER; note = 2'-fluorocytidine
  modified_base 8: mod_base = OTHER; note = 2'-O-methyluridine
  modified_base 9: mod_base = OTHER; note = 2'-fluorocytidine
  modified_base 10: mod_base = OTHER; note = 2'-fluorocytidine
  modified_base 11: mod_base = OTHER; note = 2'-fluoroadenosine
  modified_base 12: mod_base = OTHER; note = 2'-O-methyluridine
  modified_base 13: mod_base = OTHER; note = 2'-O-methyluridine
  modified_base 14: mod_base = OTHER; note = 2'-O-methylcytidine
  modified_base 15: mod_base = OTHER; note = 2'-O-methylcytidine
  modified_base 16: mod_base = OTHER; note = 2'-O-methyluridine
  modified_base 17: mod_base = OTHER; note = 2'-O-methyladenosine
  modified_base 18: mod_base = OTHER; note = 2'-O-methylcytidine
  modified_base 19: mod_base = OTHER; note = 2'-O-methyluridine
  modified_base 20: mod_base = OTHER; note = 2'-O-methyladenosine
  modified_base 21: mod_base = OTHER; note = 2'-O-methyladenosine
ggccgcctccattcctactaa

SEQ ID NO: 822 - RNA, 21 nt, synthetic construct
  source 1..21: mol_type = other RNA
  modified_base 1: mod_base = OTHER; note = 2'-O-methyladenosine with phosphorothioate linkage
  modified_base 2: mod_base = OTHER; note = 2'-O-methylcytidine with phosphorothioate linkage
  modified_base 3: mod_base = OTHER; note = 2'-O-methyluridine
  modified_base 4: mod_base = OTHER; note = 2'-O-methylguanosine
  modified_base 5: mod_base = OTHER; note = 2'-O-methylcytidine
  modified_base 6: mod_base = OTHER; note = 2'-O-methyladenosine
  modified_base 7: mod_base = OTHER; note = 2'-fluoroadenosine
  modified_base 8: mod_base = OTHER; note = 2'-O-methyladenosine
  modified_base 9: mod_base = OTHER; note = 2'-fluoroguanosine
  modified_base 10: mod_base = OTHER; note = 2'-fluoroadenosine
  modified_base 11: mod_base = OTHER; note = 2'-fluorocytidine
  modified_base 12: mod_base = OTHER; note = 2'-O-methyluridine
  modified_base 13: mod_base = OTHER; note = 2'-O-methyladenosine
  modified_base 14: mod_base = OTHER; note = 2'-O-methyluridine
  modified_base 15: mod_base = OTHER; note = 2'-O-methylguanosine
  modified_base 16: mod_base = OTHER; note = 2'-O-methyladenosine
  modified_base 17: mod_base = OTHER; note = 2'-O-methylcytidine
  modified_base 18: mod_base = OTHER; note = 2'-O-methyladenosine
  modified_base 19: mod_base = OTHER; note = 2'-O-methylguanosine
  modified_base 20: mod_base = OTHER; note = 2'-O-methylcytidine
  modified_base 21: mod_base = OTHER; note = 2'-O-methyladenosine
actgcaaagactatgacagca

SEQ ID NO: 823 - RNA, 21 nt, synthetic construct
  source 1..21: mol_type = other RNA
  modified_base 1: mod_base = OTHER; note = 2'-O-methylcytidine with phosphorothioate linkage
  modified_base 2: mod_base = OTHER; note = 2'-O-methyladenosine with phosphorothioate linkage
  modified_base 3: mod_base = OTHER; note = 2'-O-methylguanosine
  modified_base 4: mod_base = OTHER; note = 2'-O-methylcytidine
  modified_base 5: mod_base = OTHER; note = 2'-O-methyladenosine
  modified_base 6: mod_base = OTHER; note = 2'-O-methyluridine
  modified_base 7: mod_base = OTHER; note = 2'-fluorocytidine
  modified_base 8: mod_base = OTHER; note = 2'-O-methyladenosine
  modified_base 9: mod_base = OTHER; note = 2'-fluoroadenosine
  modified_base 10: mod_base = OTHER; note = 2'-fluoroadenosine
  modified_base 11: mod_base = OTHER; note = 2'-fluorouridine
  modified_base 12: mod_base = OTHER; note = 2'-O-methyluridine
  modified_base 13: mod_base = OTHER; note = 2'-O-methyluridine
  modified_base 14: mod_base = OTHER; note = 2'-O-methylcytidine
  modified_base 15: mod_base = OTHER; note = 2'-O-methyladenosine
  modified_base 16: mod_base = OTHER; note = 2'-O-methylguanosine
  modified_base 17: mod_base = OTHER; note = 2'-O-methylguanosine
  modified_base 18: mod_base = OTHER; note = 2'-O-methyladenosine
  modified_base 19: mod_base = OTHER; note = 2'-O-methylcytidine
  modified_base 20: mod_base = OTHER; note = 2'-O-methylcytidine
  modified_base 21: mod_base = OTHER; note = 2'-O-methyladenosine
cagcatcaaatttcaggacca

SEQ ID NO: 824 - RNA, 21 nt, synthetic construct
  source 1..21: mol_type = other RNA
  modified_base 1: mod_base = OTHER; note = 2'-O-methyluridine with phosphorothioate linkage
  modified_base 2: mod_base = OTHER; note = 2'-O-methylcytidine with phosphorothioate linkage
  modified_base 3: mod_base = OTHER; note = 2'-O-methyladenosine
  modified_base 4: mod_base = OTHER; note = 2'-O-methylguanosine
  modified_base 5: mod_base = OTHER; note = 2'-O-methylguanosine
  modified_base 6: mod_base = OTHER; note = 2'-O-methyladenosine
  modified_base 7: mod_base = OTHER; note = 2'-fluorocytidine
  modified_base 8: mod_base = OTHER; note = 2'-O-methylcytidine
  modified_base 9: mod_base = OTHER; note = 2'-fluorouridine
  modified_base 10: mod_base = OTHER; note = 2'-fluoroguanosine
  modified_base 11: mod_base = OTHER; note = 2'-fluorocytidine
  modified_base 12: mod_base = OTHER; note = 2'-O-methyladenosine
  modified_base 13: mod_base = OTHER; note = 2'-O-methylguanosine
  modified_base 14: mod_base = OTHER; note = 2'-O-methyladenosine
  modified_base 15: mod_base = OTHER; note = 2'-O-methylcytidine
  modified_base 16: mod_base = OTHER; note = 2'-O-methyladenosine
  modified_base 17: mod_base = OTHER; note = 2'-O-methylguanosine
  modified_base 18: mod_base = OTHER; note = 2'-O-methyluridine
  modified_base 19: mod_base = OTHER; note = 2'-O-methyladenosine
  modified_base 20: mod_base = OTHER; note = 2'-O-methylcytidine
  modified_base 21: mod_base = OTHER; note = 2'-O-methyladenosine
tcaggacctgcagacagtaca

SEQ ID NO: 825 - RNA, 21 nt, synthetic construct
  source 1..21: mol_type = other RNA
  modified_base 1: mod_base = OTHER; note = 2'-O-methylguanosine with phosphorothioate linkage
  modified_base 2: mod_base = OTHER; note = 2'-O-methylcytidine with phosphorothioate linkage
  modified_base 3: mod_base = OTHER; note = 2'-O-methyladenosine
  modified_base 4: mod_base = OTHER; note = 2'-O-methylguanosine
  modified_base 5: mod_base = OTHER; note = 2'-O-methyladenosine
  modified_base 6: mod_base = OTHER; note = 2'-O-methylcytidine
  modified_base 7: mod_base = OTHER; note = 2'-fluoroadenosine
  modified_base 8: mod_base = OTHER; note = 2'-O-methylguanosine
  modified_base 9: mod_base = OTHER; note = 2'-fluorouridine
  modified_base 10: mod_base = OTHER; note = 2'-fluoroadenosine
  modified_base 11: mod_base = OTHER; note = 2'-fluorocytidine
  modified_base 12: mod_base = OTHER; note = 2'-O-methyladenosine
  modified_base 13: mod_base = OTHER; note = 2'-O-methylguanosine
  modified_base 14: mod_base = OTHER; note = 2'-O-methylguanosine
  modified_base 15: mod_base = OTHER; note = 2'-O-methylcytidine
  modified_base 16: mod_base = OTHER; note = 2'-O-methyluridine
  modified_base 17: mod_base = OTHER; note = 2'-O-methyladenosine
  modified_base 18: mod_base = OTHER; note = 2'-O-methylguanosine
  modified_base 19: mod_base = OTHER; note = 2'-O-methyladenosine
  modified_base 20: mod_base = OTHER; note = 2'-O-methyluridine
  modified_base 21: mod_base = OTHER; note = 2'-O-methyladenosine
gcagacagtacaggctagata

SEQ ID NO: 826 - RNA, 21 nt, synthetic construct
  source 1..21: mol_type = other RNA
  modified_base 1: mod_base = OTHER; note = 2'-O-methylcytidine with phosphorothioate linkage
  modified_base 2: mod_base = OTHER; note = 2'-O-methyladenosine with phosphorothioate linkage
  modified_base 3: mod_base = OTHER; note = 2'-O-methylguanosine
  modified_base 4: mod_base = OTHER; note = 2'-O-methyladenosine
  modified_base 5: mod_base = OTHER; note = 2'-O-methylcytidine
  modified_base 6: mod_base = OTHER; note = 2'-O-methyladenosine
  modified_base 7: mod_base = OTHER; note = 2'-fluoroguanosine
  modified_base 8: mod_base = OTHER; note = 2'-O-methyluridine
  modified_base 9: mod_base = OTHER; note = 2'-fluoroadenosine
  modified_base 10: mod_base = OTHER; note = 2'-fluorocytidine
  modified_base 11: mod_base = OTHER; note = 2'-fluoroadenosine
  modified_base 12: mod_base = OTHER; note = 2'-O-methylguanosine
  modified_base 13: mod_base = OTHER; note = 2'-O-methylguanosine
  modified_base 14: mod_base = OTHER; note = 2'-O-methylcytidine
  modified_base 15: mod_base = OTHER; note = 2'-O-methyluridine
  modified_base 16: mod_base = OTHER; note = 2'-O-methyladenosine
  modified_base 17: mod_base = OTHER; note = 2'-O-methylguanosine
  modified_base 18: mod_base = OTHER; note = 2'-O-methyladenosine
  modified_base 19: mod_base = OTHER; note = 2'-O-methyluridine
  modified_base 20: mod_base = OTHER; note = 2'-O-methyladenosine
  modified_base 21: mod_base = OTHER; note = 2'-O-methyladenosine
cagacagtacaggctagataa

SEQ ID NO: 827 - RNA, 21 nt, synthetic construct
  source 1..21: mol_type = other RNA
  modified_base 1: mod_base = OTHER; note = 2'-O-methyladenosine with phosphorothioate linkage
  modified_base 2: mod_base = OTHER; note = 2'-O-methylguanosine with phosphorothioate linkage
  modified_base 3: mod_base = OTHER; note = 2'-O-methyladenosine
  modified_base 4: mod_base = OTHER; note = 2'-O-methylcytidine
  modified_base 5: mod_base = OTHER; note = 2'-O-methyladenosine
  modified_base 6: mod_base = OTHER; note = 2'-O-methylguanosine
  modified_base 7: mod_base = OTHER; note = 2'-fluorouridine
  modified_base 8: mod_base = OTHER; note = 2'-O-methyladenosine
  modified_base 9: mod_base = OTHER; note = 2'-fluorocytidine
  modified_base 10: mod_base = OTHER; note = 2'-fluoroadenosine
  modified_base 11: mod_base = OTHER; note = 2'-fluoroguanosine
  modified_base 12: mod_base = OTHER; note = 2'-O-methylguanosine
  modified_base 13: mod_base = OTHER; note = 2'-O-methylcytidine
  modified_base 14: mod_base = OTHER; note = 2'-O-methyluridine
  modified_base 15: mod_base = OTHER; note = 2'-O-methyladenosine
  modified_base 16: mod_base = OTHER; note = 2'-O-methylguanosine
  modified_base 17: mod_base = OTHER; note = 2'-O-methyladenosine
  modified_base 18: mod_base = OTHER; note = 2'-O-methyluridine
  modified_base 19: mod_base = OTHER; note = 2'-O-methyladenosine
  modified_base 20: mod_base = OTHER; note = 2'-O-methyladenosine
  modified_base 21: mod_base = OTHER; note = 2'-O-methyladenosine
agacagtacaggctagataaa

SEQ ID NO: 828 - RNA, 21 nt, synthetic construct
  source 1..21: mol_type = other RNA
  modified_base 1: mod_base = OTHER; note = 2'-O-methyluridine with phosphorothioate linkage
  modified_base 2: mod_base = OTHER; note = 2'-O-methylcytidine with phosphorothioate linkage
  modified_base 3: mod_base = OTHER; note = 2'-O-methylcytidine
  modified_base 4: mod_base = OTHER; note = 2'-O-methylcytidine
  modified_base 5: mod_base = OTHER; note = 2'-O-methyladenosine
  modified_base 6: mod_base = OTHER; note = 2'-O-methylcytidine
  modified_base 7: mod_base = OTHER; note = 2'-fluorouridine
  modified_base 8: mod_base = OTHER; note = 2'-O-methyluridine
  modified_base 9: mod_base = OTHER; note = 2'-fluoroguanosine
  modified_base 10: mod_base = OTHER; note = 2'-fluorocytidine
  modified_base 11: mod_base = OTHER; note = 2'-fluorocytidine
  modified_base 12: mod_base = OTHER; note = 2'-O-methylcytidine
  modified_base 13: mod_base = OTHER; note = 2'-O-methyluridine
  modified_base 14: mod_base = OTHER; note = 2'-O-methylguanosine
  modified_base 15: mod_base = OTHER; note = 2'-O-methyladenosine
  modified_base 16: mod_base = OTHER; note = 2'-O-methyladenosine
  modified_base 17: mod_base = OTHER; note = 2'-O-methyladenosine
  modified_base 18: mod_base = OTHER; note = 2'-O-methylguanosine
  modified_base 19: mod_base = OTHER; note = 2'-O-methylguanosine
  modified_base 20: mod_base = OTHER; note = 2'-O-methylcytidine
  modified_base 21: mod_base = OTHER; note = 2'-O-methyladenosine
tcccacttgccctgaaaggca

SEQ ID NO: 829 - RNA, 21 nt, synthetic construct
  source 1..21: mol_type = other RNA
  modified_base 1: mod_base = OTHER; note = 2'-O-methylcytidine with phosphorothioate linkage
  modified_base 2: mod_base = OTHER; note = 2'-O-methyluridine with phosphorothioate linkage
  modified_base 3: mod_base = OTHER; note = 2'-O-methylguanosine
  modified_base 4: mod_base = OTHER; note = 2'-O-methylcytidine
  modified_base 5: mod_base = OTHER; note = 2'-O-methyluridine
  modified_base 6: mod_base = OTHER; note = 2'-O-methylguanosine
  modified_base 7: mod_base = OTHER; note = 2'-fluorocytidine
  modified_base 8: mod_base = OTHER; note = 2'-O-methyluridine
  modified_base 9: mod_base = OTHER; note = 2'-fluoroadenosine
  modified_base 10: mod_base = OTHER; note = 2'-fluorocytidine
  modified_base 11: mod_base = OTHER; note = 2'-fluoroadenosine
  modified_base 12: mod_base = OTHER; note = 2'-O-methyluridine
  modified_base 13: mod_base = OTHER; note = 2'-O-methylcytidine
  modified_base 14: mod_base = OTHER; note = 2'-O-methyluridine
  modified_base 15: mod_base = OTHER; note = 2'-O-methyladenosine
  modified_base 16: mod_base = OTHER; note = 2'-O-methyladenosine
  modified_base 17: mod_base = OTHER; note = 2'-O-methyluridine
  modified_base 18: mod_base = OTHER; note = 2'-O-methylcytidine
  modified_base 19: mod_base = OTHER; note = 2'-O-methylcytidine
  modified_base 20: mod_base = OTHER; note = 2'-O-methylcytidine
  modified_base 21: mod_base = OTHER; note = 2'-O-methyladenosine
ctgctgctacatctaatccca

SEQ ID NO: 830 - RNA, 21 nt, synthetic construct
  source 1..21: mol_type = other RNA
  modified_base 1: mod_base = OTHER; note = 2'-O-methyluridine with phosphorothioate linkage
  modified_base 2: mod_base = OTHER; note = 2'-O-methylguanosine with phosphorothioate linkage
  modified_base 3: mod_base = OTHER; note = 2'-O-methylcytidine
  modified_base 4: mod_base = OTHER; note = 2'-O-methyluridine
  modified_base 5: mod_base = OTHER; note = 2'-O-methylguanosine
  modified_base 6: mod_base = OTHER; note = 2'-O-methylcytidine
  modified_base 7: mod_base = OTHER; note = 2'-fluorouridine
  modified_base 8: mod_base = OTHER; note = 2'-O-methyladenosine
  modified_base 9: mod_base = OTHER; note = 2'-fluorocytidine
  modified_base 10: mod_base = OTHER; note = 2'-fluoroadenosine
  modified_base 11: mod_base = OTHER; note = 2'-fluorouridine
  modified_base 12: mod_base = OTHER; note = 2'-O-methylcytidine
  modified_base 13: mod_base = OTHER; note = 2'-O-methyluridine
  modified_base 14: mod_base = OTHER; note = 2'-O-methyladenosine
  modified_base 15: mod_base = OTHER; note = 2'-O-methyladenosine
  modified_base 16: mod_base = OTHER; note = 2'-O-methyluridine
  modified_base 17: mod_base = OTHER; note = 2'-O-methylcytidine
  modified_base 18: mod_base = OTHER; note = 2'-O-methylcytidine
  modified_base 19: mod_base = OTHER; note = 2'-O-methylcytidine
  modified_base 20: mod_base = OTHER; note = 2'-O-methylcytidine
  modified_base 21: mod_base = OTHER; note = 2'-O-methyladenosine
tgctgctacatctaatcccca

SEQ ID NO: 831 - RNA, 21 nt, synthetic construct
  source 1..21: mol_type = other RNA
  modified_base 1: mod_base = OTHER; note = 2'-O-methylguanosine with phosphorothioate linkage
  modified_base 2: mod_base = OTHER; note = 2'-O-methylcytidine with phosphorothioate linkage
  modified_base 3: mod_base = OTHER; note = 2'-O-methyluridine
  modified_base 4: mod_base = OTHER; note = 2'-O-methylguanosine
  modified_base 5: mod_base = OTHER; note = 2'-O-methylcytidine
  modified_base 6: mod_base = OTHER; note = 2'-O-methyluridine
  modified_base 7: mod_base = OTHER; note = 2'-fluoroadenosine
  modified_base 8: mod_base = OTHER; note = 2'-O-methylcytidine
  modified_base 9: mod_base = OTHER; note = 2'-fluoroadenosine
  modified_base 10: mod_base = OTHER; note = 2'-fluorouridine
  modified_base 11: mod_base = OTHER; note = 2'-fluorocytidine
  modified_base 12: mod_base = OTHER; note = 2'-O-methyluridine
  modified_base 13: mod_base = OTHER; note = 2'-O-methyladenosine
  modified_base 14: mod_base = OTHER; note = 2'-O-methyladenosine
  modified_base 15: mod_base = OTHER; note = 2'-O-methyluridine
  modified_base 16: mod_base = OTHER; note = 2'-O-methylcytidine
  modified_base 17: mod_base = OTHER; note = 2'-O-methylcytidine
  modified_base 18: mod_base = OTHER; note = 2'-O-methylcytidine
  modified_base 19: mod_base = OTHER; note = 2'-O-methylcytidine
  modified_base 20: mod_base = OTHER; note = 2'-O-methyluridine
  modified_base 21: mod_base = OTHER; note = 2'-O-methyladenosine
gctgctacatctaatccccta

SEQ ID NO: 832 - RNA, 21 nt, synthetic construct
  source 1..21: mol_type = other RNA
  modified_base 1: mod_base = OTHER; note = 2'-O-methyladenosine with phosphorothioate linkage
  modified_base 2: mod_base = OTHER; note = 2'-O-methylcytidine with phosphorothioate linkage
  modified_base 3: mod_base = OTHER; note = 2'-O-methyladenosine
  modified_base 4: mod_base = OTHER; note = 2'-O-methyluridine
  modified_base 5: mod_base = OTHER; note = 2'-O-methylcytidine
  modified_base 6: mod_base = OTHER; note = 2'-O-methyluridine
  modified_base 7: mod_base = OTHER; note = 2'-fluoroadenosine
  modified_base 8: mod_base = OTHER; note = 2'-O-methyladenosine
  modified_base 9: mod_base = OTHER; note = 2'-fluorouridine
  modified_base 10: mod_base = OTHER; note = 2'-fluorocytidine
  modified_base 11: mod_base = OTHER; note = 2'-fluorocytidine
  modified_base 12: mod_base = OTHER; note = 2'-O-methylcytidine
  modified_base 13: mod_base = OTHER; note = 2'-O-methylcytidine
  modified_base 14: mod_base = OTHER; note = 2'-O-methyluridine
  modified_base 15: mod_base = OTHER; note = 2'-O-methyladenosine
  modified_base 16: mod_base = OTHER; note = 2'-O-methylcytidine
  modified_base 17: mod_base = OTHER; note = 2'-O-methylcytidine
  modified_base 18: mod_base = OTHER; note = 2'-O-methyladenosine
  modified_base 19: mod_base = OTHER; note = 2'-O-methyladenosine
  modified_base 20: mod_base = OTHER; note = 2'-O-methyluridine
  modified_base 21: mod_base = OTHER; note = 2'-O-methyladenosine
acatctaatcccctaccaata

SEQ ID NO: 833 - RNA, 21 nt, synthetic construct
  source 1..21: mol_type = other RNA
  modified_base 1: mod_base = OTHER; note = 2'-O-methyladenosine with phosphorothioate linkage
  modified_base 2: mod_base = OTHER; note = 2'-O-methyluridine with phosphorothioate linkage
  modified_base 3: mod_base = OTHER; note = 2'-O-methylcytidine
  modified_base 4: mod_base = OTHER; note = 2'-O-methyluridine
  modified_base 5: mod_base = OTHER; note = 2'-O-methyladenosine
  modified_base 6: mod_base = OTHER; note = 2'-O-methyladenosine
  modified_base 7: mod_base = OTHER; note = 2'-fluorouridine
  modified_base 8: mod_base = OTHER; note = 2'-O-methylcytidine
  modified_base 9: mod_base = OTHER; note = 2'-fluorocytidine
  modified_base 10: mod_base = OTHER; note = 2'-fluorocytidine
  modified_base 11: mod_base = OTHER; note = 2'-fluorocytidine
  modified_base 12: mod_base = OTHER; note = 2'-O-methyluridine
  modified_base 13: mod_base = OTHER; note = 2'-O-methyladenosine
  modified_base 14: mod_base = OTHER; note = 2'-O-methylcytidine
  modified_base 15: mod_base = OTHER; note = 2'-O-methylcytidine
  modified_base 16: mod_base = OTHER; note = 2'-O-methyladenosine
  modified_base 17: mod_base = OTHER; note = 2'-O-methyladenosine
  modified_base 18: mod_base = OTHER; note = 2'-O-methyluridine
  modified_base 19: mod_base = OTHER; note = 2'-O-methylguanosine
  modified_base 20: mod_base = OTHER; note = 2'-O-methylcytidine
  modified_base 21: mod_base = OTHER; note = 2'-O-methyladenosine
atctaatcccctaccaatgca

SEQ ID NO: 834 - RNA, 21 nt, synthetic construct
  source 1..21: mol_type = other RNA
  modified_base 1: mod_base = OTHER; note = 2'-O-methylcytidine with phosphorothioate linkage
  modified_base 2: mod_base = OTHER; note = 2'-O-methylcytidine with phosphorothioate linkage
  modified_base 3: mod_base = OTHER; note = 2'-O-methylcytidine
  modified_base 4: mod_base = OTHER; note = 2'-O-methylcytidine
  modified_base 5: mod_base = OTHER; note = 2'-O-methyluridine
  modified_base 6: mod_base = OTHER; note = 2'-O-methyladenosine
  modified_base 7: mod_base = OTHER; note = 2'-fluorocytidine
  modified_base 8: mod_base = OTHER; note = 2'-O-methylcytidine
  modified_base 9: mod_base = OTHER; note = 2'-fluoroadenosine
  modified_base 10: mod_base = OTHER; note = 2'-fluoroadenosine
  modified_base 11: mod_base = OTHER; note = 2'-fluorouridine
  modified_base 12: mod_base = OTHER; note = 2'-O-methylguanosine
  modified_base 13: mod_base = OTHER; note = 2'-O-methylcytidine
  modified_base 14: mod_base = OTHER; note = 2'-O-methylcytidine
  modified_base 15: mod_base = OTHER; note = 2'-O-methyluridine
  modified_base 16: mod_base = OTHER; note = 2'-O-methylcytidine
  modified_base 17: mod_base = OTHER; note = 2'-O-methylcytidine
  modified_base 18: mod_base = OTHER; note = 2'-O-methyluridine
  modified_base 19: mod_base = OTHER; note = 2'-O-methylguanosine
  modified_base 20: mod_base = OTHER; note = 2'-O-methyluridine
  modified_base 21: mod_base = OTHER; note = 2'-O-methyladenosine
cccctaccaatgcctcctgta

SEQ ID NO: 835 - RNA, 21 nt, synthetic construct
  source 1..21: mol_type = other RNA
  modified_base 1: mod_base = OTHER; note = 2'-O-methylcytidine with phosphorothioate linkage
  modified_base 2: mod_base = OTHER; note = 2'-O-methylcytidine with phosphorothioate linkage
  modified_base 3: mod_base = OTHER; note = 2'-O-methylcytidine
  modified_base 4: mod_base = OTHER; note = 2'-O-methyluridine
  modified_base 5: mod_base = OTHER; note = 2'-O-methyladenosine
  modified_base 6: mod_base = OTHER; note = 2'-O-methylcytidine
  modified_base 7: mod_base = OTHER; note = 2'-fluorocytidine
  modified_base 8: mod_base = OTHER; note = 2'-O-methyladenosine
  modified_base 9: mod_base = OTHER; note = 2'-fluoroadenosine
  modified_base 10: mod_base = OTHER; note = 2'-fluorouridine
  modified_base 11: mod_base = OTHER; note = 2'-fluoroguanosine
  modified_base 12: mod_base = OTHER; note = 2'-O-methylcytidine
  modified_base 13: mod_base = OTHER; note = 2'-O-methylcytidine
  modified_base 14: mod_base = OTHER; note = 2'-O-methyluridine
  modified_base 15: mod_base = OTHER; note = 2'-O-methylcytidine
  modified_base 16: mod_base = OTHER; note = 2'-O-methylcytidine
  modified_base 17: mod_base = OTHER; note = 2'-O-methyluridine
  modified_base 18: mod_base = OTHER; note = 2'-O-methylguanosine
  modified_base 19: mod_base = OTHER; note = 2'-O-methyluridine
  modified_base 20: mod_base = OTHER; note = 2'-O-methylcytidine
  modified_base 21: mod_base = OTHER; note = 2'-O-methyladenosine
ccctaccaatgcctcctgtca

SEQ ID NO: 836 - RNA, 21 nt, synthetic construct
  source 1..21: mol_type = other RNA
  modified_base 1: mod_base = OTHER; note = 2'-O-methyladenosine with phosphorothioate linkage
  modified_base 2: mod_base = OTHER; note = 2'-O-methylcytidine with phosphorothioate linkage
  modified_base 3: mod_base = OTHER; note = 2'-O-methylcytidine
  modified_base 4: mod_base = OTHER; note = 2'-O-methyladenosine
  modified_base 5: mod_base = OTHER; note = 2'-O-methyladenosine
  modified_base 6: mod_base = OTHER; note = 2'-O-methyluridine
  modified_base 7: mod_base = OTHER; note = 2'-fluoroguanosine
  modified_base 8: mod_base = OTHER; note = 2'-O-methylcytidine
  modified_base 9: mod_base = OTHER; note = 2'-fluorocytidine
  modified_base 10: mod_base = OTHER; note = 2'-fluorouridine
  modified_base 11: mod_base = OTHER; note = 2'-fluorocytidine
  modified_base 12: mod_base = OTHER; note = 2'-O-methylcytidine
  modified_base 13: mod_base = OTHER; note = 2'-O-methyluridine
  modified_base 14: mod_base = OTHER; note = 2'-O-methylguanosine
  modified_base 15: mod_base = OTHER; note = 2'-O-methyluridine
  modified_base 16: mod_base = OTHER; note = 2'-O-methylcytidine
  modified_base 17: mod_base = OTHER; note = 2'-O-methylcytidine
  modified_base 18: mod_base = OTHER; note = 2'-O-methylcytidine
  modified_base 19: mod_base = OTHER; note = 2'-O-methyluridine
  modified_base 20: mod_base = OTHER; note = 2'-O-methyladenosine
  modified_base 21: mod_base = OTHER; note = 2'-O-methyladenosine
accaatgcctcctgtccctaa

SEQ ID NO: 837 - RNA, 21 nt, synthetic construct
  source 1..21: mol_type = other RNA
  modified_base 1: mod_base = OTHER; note = 2'-O-methylcytidine with phosphorothioate linkage
  modified_base 2: mod_base = OTHER; note = 2'-O-methylcytidine with phosphorothioate linkage
  modified_base 3: mod_base = OTHER; note = 2'-O-methyladenosine
  modified_base 4: mod_base = OTHER; note = 2'-O-methyladenosine
  modified_base 5: mod_base = OTHER; note = 2'-O-methyluridine
  modified_base 6: mod_base = OTHER; note = 2'-O-methylguanosine
  modified_base 7: mod_base = OTHER; note = 2'-fluorocytidine
  modified_base 8: mod_base = OTHER; note = 2'-O-methylcytidine
  modified_base 9: mod_base = OTHER; note = 2'-fluorouridine
  modified_base 10: mod_base = OTHER; note = 2'-fluorocytidine
  modified_base 11: mod_base = OTHER; note = 2'-fluorocytidine
  modified_base 12: mod_base = OTHER; note = 2'-O-methyluridine
  modified_base 13: mod_base = OTHER; note = 2'-O-methylguanosine
  modified_base 14: mod_base = OTHER; note = 2'-O-methyluridine
  modified_base 15: mod_base = OTHER; note = 2'-O-methylcytidine
  modified_base 16: mod_base = OTHER; note = 2'-O-methylcytidine
  modified_base 17: mod_base = OTHER; note = 2'-O-methylcytidine
  modified_base 18: mod_base = OTHER; note = 2'-O-methyluridine
  modified_base 19: mod_base = OTHER; note = 2'-O-methyladenosine
  modified_base 20: mod_base = OTHER; note = 2'-O-methyladenosine
  modified_base 21: mod_base = OTHER; note = 2'-O-methyladenosine
ccaatgcctcctgtccctaaa

SEQ ID NO: 838 - RNA, 21 nt, synthetic construct
  source 1..21: mol_type = other RNA
  modified_base 1: mod_base = OTHER; note = 2'-O-methyladenosine with phosphorothioate linkage
  modified_base 2: mod_base = OTHER; note = 2'-O-methyluridine with phosphorothioate linkage
  modified_base 3: mod_base = OTHER; note = 2'-O-methylguanosine
  modified_base 4: mod_base = OTHER; note = 2'-O-methylcytidine
  modified_base 5: mod_base = OTHER; note = 2'-O-methylcytidine
  modified_base 6: mod_base = OTHER; note = 2'-O-methyluridine
  modified_base 7: mod_base = OTHER; note = 2'-fluorocytidine
  modified_base 8: mod_base = OTHER; note = 2'-O-methylcytidine
  modified_base 9: mod_base = OTHER; note = 2'-fluorouridine
  modified_base 10: mod_base = OTHER; note = 2'-fluoroguanosine
  modified_base 11: mod_base = OTHER; note = 2'-fluorouridine
  modified_base 12: mod_base = OTHER; note = 2'-O-methylcytidine
  modified_base 13: mod_base = OTHER; note = 2'-O-methylcytidine
  modified_base 14: mod_base = OTHER; note = 2'-O-methylcytidine
  modified_base 15: mod_base = OTHER; note = 2'-O-methyluridine
  modified_base 16: mod_base = OTHER; note = 2'-O-methyladenosine
  modified_base 17: mod_base = OTHER; note = 2'-O-methyladenosine
  modified_base 18: mod_base = OTHER; note = 2'-O-methyladenosine
  modified_base 19: mod_base = OTHER; note = 2'-O-methylcytidine
  modified_base 20: mod_base = OTHER; note = 2'-O-methyluridine
  modified_base 21: mod_base = OTHER; note = 2'-O-methyladenosine
atgcctcctgtccctaaacta

SEQ ID NO: 839 - RNA, 21 nt, synthetic construct
  source 1..21: mol_type = other RNA
  modified_base 1: mod_base = OTHER; note = 2'-O-methyluridine with phosphorothioate linkage
  modified_base 2: mod_base = OTHER; note = 2'-O-methylguanosine with phosphorothioate linkage
  modified_base 3: mod_base = OTHER; note = 2'-O-methylcytidine
  modified_base 4: mod_base = OTHER; note = 2'-O-methylcytidine
  modified_base 5: mod_base = OTHER; note = 2'-O-methyluridine
  modified_base 6: mod_base = OTHER; note = 2'-O-methylcytidine
  modified_base 7: mod_base = OTHER; note = 2'-fluorocytidine
  modified_base 8: mod_base = OTHER; note = 2'-O-methyluridine
  modified_base 9: mod_base = OTHER; note = 2'-fluoroguanosine
  modified_base 10: mod_base = OTHER; note = 2'-fluorouridine
  modified_base 11: mod_base = OTHER; note = 2'-fluorocytidine
  modified_base 12: mod_base = OTHER; note = 2'-O-methylcytidine
  modified_base 13: mod_base = OTHER; note = 2'-O-methylcytidine
  modified_base 14: mod_base = OTHER; note = 2'-O-methyluridine
  modified_base 15: mod_base = OTHER; note = 2'-O-methyladenosine
  modified_base 16: mod_base = OTHER; note = 2'-O-methyladenosine
  modified_base 17: mod_base = OTHER; note = 2'-O-methyladenosine
  modified_base 18: mod_base = OTHER; note = 2'-O-methylcytidine
  modified_base 19: mod_base = OTHER; note = 2'-O-methyluridine
  modified_base 20: mod_base = OTHER; note = 2'-O-methylcytidine
  modified_base 21: mod_base = OTHER; note = 2'-O-methyladenosine
tgcctcctgtccctaaactca

SEQ ID NO: 840 - RNA, 21 nt, synthetic construct
  source 1..21: mol_type = other RNA
  modified_base 1: mod_base = OTHER; note = 2'-O-methyluridine with phosphorothioate linkage
  modified_base 2: mod_base = OTHER; note = 2'-O-methyladenosine with phosphorothioate linkage
  modified_base 3: mod_base = OTHER; note = 2'-O-methylcytidine
  modified_base 4: mod_base = OTHER; note = 2'-O-methyluridine
  modified_base 5: mod_base = OTHER; note = 2'-O-methylguanosine
  modified_base 6: mod_base = OTHER; note = 2'-O-methyladenosine
  modified_base 7: mod_base = OTHER; note = 2'-fluorouridine
  modified_base 8: mod_base = OTHER; note = 2'-O-methylguanosine
  modified_base 9: mod_base = OTHER; note = 2'-fluoroadenosine
  modified_base 10: mod_base = OTHER; note = 2'-fluorocytidine
  modified_base 11: mod_base = OTHER; note = 2'-fluoroadenosine
  modified_base 12: mod_base = OTHER; note = 2'-O-methylguanosine
  modified_base 13: mod_base = OTHER; note = 2'-O-methylcytidine
  modified_base 14: mod_base = OTHER; note = 2'-O-methylcytidine
  modified_base 15: mod_base = OTHER; note = 2'-O-methylcytidine
  modified_base 16: mod_base = OTHER; note = 2'-O-methyluridine
  modified_base 17: mod_base = OTHER; note = 2'-O-methylcytidine
  modified_base 18: mod_base = OTHER; note = 2'-O-methyluridine
  modified_base 19: mod_base = OTHER; note = 2'-O-methylcytidine
  modified_base 20: mod_base = OTHER; note = 2'-O-methyluridine
  modified_base 21: mod_base = OTHER; note = 2'-O-methyladenosine
tactgatgacagccctctcta

SEQ ID NO: 841 - RNA, 21 nt, synthetic construct
  source 1..21: mol_type = other RNA
  modified_base 1: mod_base = OTHER; note = 2'-O-methyladenosine with phosphorothioate linkage
  modified_base 2: mod_base = OTHER; note = 2'-O-methylguanosine with phosphorothioate linkage
  modified_base 3: mod_base = OTHER; note = 2'-O-methylcytidine
  modified_base 4: mod_base = OTHER; note = 2'-O-methyluridine
  modified_base 5: mod_base = OTHER; note = 2'-O-methylcytidine
  modified_base 6: mod_base = OTHER; note = 2'-O-methyladenosine
  modified_base 7: mod_base = OTHER; note = 2'-fluoroguanosine
  modified_base 8: mod_base = OTHER; note = 2'-O-methylcytidine
  modified_base 9: mod_base = OTHER; note = 2'-fluoroadenosine
  modified_base 10: mod_base = OTHER; note = 2'-fluoroguanosine
  modified_base 11: mod_base = OTHER; note = 2'-fluorouridine
  modified_base 12: mod_base = OTHER; note = 2'-O-methylguanosine
  modified_base 13: mod_base = OTHER; note = 2'-O-methyluridine
  modified_base 14: mod_base = OTHER; note = 2'-O-methylcytidine
  modified_base 15: mod_base = OTHER; note = 2'-O-methyluridine
  modified_base 16: mod_base = OTHER; note = 2'-O-methylcytidine
  modified_base 17: mod_base = OTHER; note = 2'-O-methylguanosine
  modified_base 18: mod_base = OTHER; note = 2'-O-methyluridine
  modified_base 19: mod_base = OTHER; note = 2'-O-methyluridine
  modified_base 20: mod_base = OTHER; note = 2'-O-methylcytidine
  modified_base 21: mod_base = OTHER; note = 2'-O-methyladenosine
agctcagcagtgtctcgttca

SEQ ID NO: 842 - RNA, 21 nt, synthetic construct
  source 1..21: mol_type = other RNA
  modified_base 1: mod_base = OTHER; note = 2'-O-methylguanosine with phosphorothioate linkage
  modified_base 2: mod_base = OTHER; note = 2'-O-methylcytidine with phosphorothioate linkage
  modified_base 3: mod_base = OTHER; note = 2'-O-methyluridine
  modified_base 4: mod_base = OTHER; note = 2'-O-methylcytidine
  modified_base 5: mod_base = OTHER; note = 2'-O-methyladenosine
  modified_base 6: mod_base = OTHER; note = 2'-O-methylguanosine
  modified_base 7: mod_base = OTHER; note = 2'-fluorocytidine
  modified_base 8: mod_base = OTHER; note = 2'-O-methyladenosine
  modified_base 9: mod_base = OTHER; note = 2'-fluoroguanosine
  modified_base 10: mod_base = OTHER; note = 2'-fluorouridine
  modified_base 11: mod_base = OTHER; note = 2'-fluoroguanosine
  modified_base 12: mod_base = OTHER; note = 2'-O-methyluridine
  modified_base 13: mod_base = OTHER; note = 2'-O-methylcytidine
  modified_base 14: mod_base = OTHER; note = 2'-O-methyluridine
  modified_base 15: mod_base = OTHER; note = 2'-O-methylcytidine
  modified_base 16: mod_base = OTHER; note = 2'-O-methylguanosine
  modified_base 17: mod_base = OTHER; note = 2'-O-methyluridine
  modified_base 18: mod_base = OTHER; note = 2'-O-methyluridine
  modified_base 19: mod_base = OTHER; note = 2'-O-methylcytidine
  modified_base 20: mod_base = OTHER; note = 2'-O-methylcytidine
  modified_base 21: mod_base = OTHER; note = 2'-O-methyladenosine
gctcagcagtgtctcgttcca

SEQ ID NO: 843 - RNA, 21 nt, synthetic construct
  source 1..21: mol_type = other RNA
  modified_base 1: mod_base = OTHER; note = 2'-O-methylguanosine with phosphorothioate linkage
  modified_base 2: mod_base = OTHER; note = 2'-O-methylguanosine with phosphorothioate linkage
  modified_base 3: mod_base = OTHER; note = 2'-O-methyladenosine
  modified_base 4: mod_base = OTHER; note = 2'-O-methylcytidine
  modified_base 5: mod_base = OTHER; note = 2'-O-methylguanosine
  modified_base 6: mod_base = OTHER; note = 2'-O-methylguanosine
  modified_base 7: mod_base = OTHER; note = 2'-fluorouridine
  modified_base 8: mod_base = OTHER; note = 2'-O-methyladenosine
  modified_base 9: mod_base = OTHER; note = 2'-fluoroguanosine
  modified_base 10: mod_base = OTHER; note = 2'-fluorocytidine
  modified_base 11: mod_base = OTHER; note = 2'-fluoroadenosine
  modified_base 12: mod_base = OTHER; note = 2'-O-methylguanosine
  modified_base 13: mod_base = OTHER; note = 2'-O-methyladenosine
  modified_base 14: mod_base = OTHER; note = 2'-O-methylcytidine
  modified_base 15: mod_base = OTHER; note = 2'-O-methylcytidine
  modified_base 16: mod_base = OTHER; note = 2'-O-methylguanosine
  modified_base 17: mod_base = OTHER; note = 2'-O-methyladenosine
  modified_base 18: mod_base = OTHER; note = 2'-O-methylcytidine
  modified_base 19: mod_base = OTHER; note = 2'-O-methyladenosine
  modified_base 20: mod_base = OTHER; note = 2'-O-methyluridine
  modified_base 21: mod_base = OTHER; note = 2'-O-methyladenosine
ggacggtagcagaccgacata

SEQ ID NO: 844 - RNA, 21 nt, synthetic construct
  source 1..21: mol_type = other RNA
  modified_base 1: mod_base = OTHER; note = 2'-O-methyladenosine with phosphorothioate linkage
  modified_base 2: mod_base = OTHER; note = 2'-O-methylcytidine with phosphorothioate linkage
  modified_base 3: mod_base = OTHER; note = 2'-O-methylguanosine
  modified_base 4: mod_base = OTHER; note = 2'-O-methylguanosine
  modified_base 5: mod_base = OTHER; note = 2'-O-methyluridine
  modified_base 6: mod_base = OTHER; note = 2'-O-methyladenosine
  modified_base 7: mod_base = OTHER; note = 2'-fluoroguanosine
  modified_base 8: mod_base = OTHER; note = 2'-O-methylcytidine
  modified_base 9: mod_base = OTHER; note = 2'-fluoroadenosine
  modified_base 10: mod_base = OTHER; note = 2'-fluoroguanosine
  modified_base 11: mod_base = OTHER; note = 2'-fluoroadenosine
  modified_base 12: mod_base = OTHER; note = 2'-O-methylcytidine
  modified_base 13: mod_base = OTHER; note = 2'-O-methylcytidine
  modified_base 14: mod_base = OTHER; note = 2'-O-methylguanosine
  modified_base 15: mod_base = OTHER; note = 2'-O-methyladenosine
  modified_base 16: mod_base = OTHER; note = 2'-O-methylcytidine
  modified_base 17: mod_base = OTHER; note = 2'-O-methyladenosine
  modified_base 18: mod_base = OTHER; note = 2'-O-methyluridine
  modified_base 19: mod_base = OTHER; note = 2'-O-methylcytidine
  modified_base 20: mod_base = OTHER; note = 2'-O-methylcytidine
  modified_base 21: mod_base = OTHER; note = 2'-O-methyladenosine
acggtagcagaccgacatcca

SEQ ID NO: 845 - RNA, 21 nt, synthetic construct
  source 1..21: mol_type = other RNA
  modified_base 1: mod_base = OTHER; note = 2'-O-methylcytidine with phosphorothioate linkage
  modified_base 2: mod_base = OTHER; note = 2'-O-methylguanosine with phosphorothioate linkage
  modified_base 3: mod_base = OTHER; note = 2'-O-methylguanosine
  modified_base 4: mod_base = OTHER; note = 2'-O-methyluridine
  modified_base 5: mod_base = OTHER; note = 2'-O-methyladenosine
  modified_base 6: mod_base = OTHER; note = 2'-O-methylguanosine
  modified_base 7: mod_base = OTHER; note = 2'-fluorocytidine
  modified_base 8: mod_base = OTHER; note = 2'-O-methyladenosine
  modified_base 9: mod_base = OTHER; note = 2'-fluoroguanosine
  modified_base 10: mod_base = OTHER; note = 2'-fluoroadenosine
  modified_base 11: mod_base = OTHER; note = 2'-fluorocytidine
  modified_base 12: mod_base = OTHER; note = 2'-O-methylcytidine
  modified_base 13: mod_base = OTHER; note = 2'-O-methylguanosine
  modified_base 14: mod_base = OTHER; note = 2'-O-methyladenosine
  modified_base 15: mod_base = OTHER; note = 2'-O-methylcytidine
  modified_base 16: mod_base = OTHER; note = 2'-O-methyladenosine
  modified_base 17: mod_base = OTHER; note = 2'-O-methyluridine
  modified_base 18: mod_base = OTHER; note = 2'-O-methylcytidine
  modified_base 19: mod_base = OTHER; note = 2'-O-methylcytidine
  modified_base 20: mod_base = OTHER; note = 2'-O-methyluridine
  modified_base 21: mod_base = OTHER; note = 2'-O-methyladenosine
cggtagcagaccgacatccta

SEQ ID NO: 846 - RNA, 21 nt, synthetic construct
  source 1..21: mol_type = other RNA
  modified_base 1: mod_base = OTHER; note = 2'-O-methyladenosine with phosphorothioate linkage
  modified_base 2: mod_base = OTHER; note = 2'-O-methylguanosine with phosphorothioate linkage
  modified_base 3: mod_base = OTHER; note = 2'-O-methylcytidine
  modified_base 4: mod_base = OTHER; note = 2'-O-methyladenosine
  modified_base 5: mod_base = OTHER; note = 2'-O-methylguanosine
  modified_base 6: mod_base = OTHER; note = 2'-O-methyladenosine
  modified_base 7: mod_base = OTHER; note = 2'-fluorocytidine
  modified_base 8: mod_base = OTHER; note = 2'-O-methylcytidine
  modified_base 9: mod_base = OTHER; note = 2'-fluoroguanosine
  modified_base 10: mod_base = OTHER; note = 2'-fluoroadenosine
  modified_base 11: mod_base = OTHER; note = 2'-fluorocytidine
  modified_base 12: mod_base = OTHER; note = 2'-O-methyladenosine
  modified_base 13: mod_base = OTHER; note = 2'-O-methyluridine
  modified_base 14: mod_base = OTHER; note = 2'-O-methylcytidine
  modified_base 15: mod_base = OTHER; note = 2'-O-methylcytidine
  modified_base 16: mod_base = OTHER; note = 2'-O-methyluridine
  modified_base 17: mod_base = OTHER; note = 2'-O-methyluridine
  modified_base 18: mod_base = OTHER; note = 2'-O-methylcytidine
  modified_base 19: mod_base = OTHER; note = 2'-O-methyluridine
  modified_base 20: mod_base = OTHER; note = 2'-O-methylguanosine
  modified_base 21: mod_base = OTHER; note = 2'-O-methyladenosine
agcagaccgacatccttctga

SEQ ID NO: 847 - RNA, 21 nt, synthetic construct
  source 1..21: mol_type = other RNA
  modified_base 1: mod_base = OTHER; note = 2'-O-methylguanosine with phosphorothioate linkage
  modified_base 2: mod_base = OTHER; note = 2'-O-methylcytidine with phosphorothioate linkage
  modified_base 3: mod_base = OTHER; note = 2'-O-methyladenosine
  modified_base 4: mod_base = OTHER; note = 2'-O-methylguanosine
  modified_base 5: mod_base = OTHER; note = 2'-O-methyladenosine
  modified_base 6: mod_base = OTHER; note = 2'-O-methylcytidine
  modified_base 7: mod_base = OTHER; note = 2'-fluorocytidine
  modified_base 8: mod_base = OTHER; note = 2'-O-methylguanosine
  modified_base 9: mod_base = OTHER; note = 2'-fluoroadenosine
  modified_base 10: mod_base = OTHER; note = 2'-fluorocytidine
  modified_base 11: mod_base = OTHER; note = 2'-fluoroadenosine
  modified_base 12: mod_base = OTHER; note = 2'-O-methyluridine
  modified_base 13: mod_base = OTHER; note = 2'-O-methylcytidine
  modified_base 14: mod_base = OTHER; note = 2'-O-methylcytidine
  modified_base 15: mod_base = OTHER; note = 2'-O-methyluridine
  modified_base 16: mod_base = OTHER; note = 2'-O-methyluridine
  modified_base 17: mod_base = OTHER; note = 2'-O-methylcytidine
  modified_base 18: mod_base = OTHER; note = 2'-O-methyluridine
  modified_base 19: mod_base = OTHER; note = 2'-O-methylguanosine
  modified_base 20: mod_base = OTHER; note = 2'-O-methylguanosine
  modified_base 21: mod_base = OTHER; note = 2'-O-methyladenosine
gcagaccgacatccttctgga

SEQ ID NO: 848 - RNA, 21 nt, synthetic construct
  source 1..21: mol_type = other RNA
  modified_base 1: mod_base = OTHER; note = 2'-O-methyluridine with phosphorothioate linkage
  modified_base 2: mod_base = OTHER; note = 2'-O-methylcytidine with phosphorothioate linkage
  modified_base 3: mod_base = OTHER; note = 2'-O-methylcytidine
  modified_base 4: mod_base = OTHER; note = 2'-O-methyladenosine
  modified_base 5: mod_base = OTHER; note = 2'-O-methyluridine
  modified_base 6: mod_base = OTHER; note = 2'-O-methylguanosine
  modified_base 7: mod_base = OTHER; note = 2'-fluorocytidine
  modified_base 8: mod_base = OTHER; note = 2'-O-methyladenosine
  modified_base 9: mod_base = OTHER; note = 2'-fluoroadenosine
  modified_base 10: mod_base = OTHER; note = 2'-fluorocytidine
  modified_base 11: mod_base = OTHER; note = 2'-fluorouridine
  modified_base 12: mod_base = OTHER; note = 2'-O-methylguanosine
  modified_base 13: mod_base = OTHER; note = 2'-O-methyluridine
  modified_base 14: mod_base = OTHER; note = 2'-O-methylcytidine
  modified_base 15: mod_base = OTHER; note = 2'-O-methylcytidine
  modified_base 16: mod_base = OTHER; note = 2'-O-methyladenosine
  modified_base 17: mod_base = OTHER; note = 2'-O-methyluridine
  modified_base 18: mod_base = OTHER; note = 2'-O-methylcytidine
  modified_base 19: mod_base = OTHER; note = 2'-O-methyladenosine
  modified_base 20: mod_base = OTHER; note = 2'-O-methylcytidine
  modified_base 21: mod_base = OTHER; note = 2'-O-methyladenosine
tccatgcaactgtccatcaca

SEQ ID NO: 849 - RNA, 21 nt, synthetic construct
  source 1..21: mol_type = other RNA
  modified_base 1: mod_base = OTHER; note = 2'-O-methylcytidine with phosphorothioate linkage
  modified_base 2: mod_base = OTHER; note = 2'-O-methylcytidine with phosphorothioate linkage
  modified_base 3: mod_base = OTHER; note = 2'-O-methyladenosine
  modified_base 4: mod_base = OTHER; note = 2'-O-methyluridine
  modified_base 5: mod_base = OTHER; note = 2'-O-methylguanosine
  modified_base 6: mod_base = OTHER; note = 2'-O-methylcytidine
  modified_base 7: mod_base = OTHER; note = 2'-fluoroadenosine
  modified_base 8: mod_base = OTHER; note = 2'-O-methyladenosine
  modified_base 9: mod_base = OTHER; note = 2'-fluorocytidine
  modified_base 10: mod_base = OTHER; note = 2'-fluorouridine
  modified_base 11: mod_base = OTHER; note = 2'-fluoroguanosine
  modified_base 12: mod_base = OTHER; note = 2'-O-methyluridine
  modified_base 13: mod_base = OTHER; note = 2'-O-methylcytidine
  modified_base 14: mod_base = OTHER; note = 2'-O-methylcytidine
  modified_base 15: mod_base = OTHER; note = 2'-O-methyladenosine
  modified_base 16: mod_base = OTHER; note = 2'-O-methyluridine
  modified_base 17: mod_base = OTHER; note = 2'-O-methylcytidine
  modified_base 18: mod_base = OTHER; note = 2'-O-methyladenosine
  modified_base 19: mod_base = OTHER; note = 2'-O-methylcytidine
  modified_base 20: mod_base = OTHER; note = 2'-O-methylguanosine
  modified_base 21: mod_base = OTHER; note = 2'-O-methyladenosine
ccatgcaactgtccatcacga

SEQ ID NO: 850 - RNA, 21 nt, synthetic construct
  source 1..21: mol_type = other RNA
  modified_base 1: mod_base = OTHER; note = 2'-O-methylcytidine with phosphorothioate linkage
  modified_base 2: mod_base = OTHER; note = 2'-O-methyladenosine with phosphorothioate linkage
  modified_base 3: mod_base = OTHER; note = 2'-O-methyluridine
  modified_base 4: mod_base = OTHER; note = 2'-O-methylguanosine
  modified_base 5: mod_base = OTHER; note = 2'-O-methylcytidine
  modified_base 6: mod_base = OTHER; note = 2'-O-methyladenosine
  modified_base 7: mod_base = OTHER; note = 2'-fluoroadenosine
  modified_base 8: mod_base = OTHER; note = 2'-O-methylcytidine
  modified_base 9: mod_base = OTHER; note = 2'-fluorouridine
  modified_base 10: mod_base = OTHER; note = 2'-fluoroguanosine
  modified_base 11: mod_base = OTHER; note = 2'-fluorouridine
  modified_base 12: mod_base = OTHER; note = 2'-O-methylcytidine
  modified_base 13: mod_base = OTHER; note = 2'-O-methylcytidine
  modified_base 14: mod_base = OTHER; note = 2'-O-methyladenosine
  modified_base 15: mod_base = OTHER; note = 2'-O-methyluridine
  modified_base 16: mod_base = OTHER; note = 2'-O-methylcytidine
  modified_base 17: mod_base = OTHER; note = 2'-O-methyladenosine
  modified_base 18: mod_base = OTHER; note = 2'-O-methylcytidine
  modified_base 19: mod_base = OTHER; note = 2'-O-methylguanosine
  modified_base 20: mod_base = OTHER; note = 2'-O-methylguanosine
  modified_base 21: mod_base = OTHER; note = 2'-O-methyladenosine
catgcaactgtccatcacgga

SEQ ID NO: 851 - RNA, 21 nt, synthetic construct
  source 1..21: mol_type = other RNA
  modified_base 1: mod_base = OTHER; note = 2'-O-methyladenosine with phosphorothioate linkage
  modified_base 2: mod_base = OTHER; note = 2'-O-methyladenosine with phosphorothioate linkage
  modified_base 3: mod_base = OTHER; note = 2'-O-methylcytidine
  modified_base 4: mod_base = OTHER; note = 2'-O-methyluridine
  modified_base 5: mod_base = OTHER; note = 2'-O-methylguanosine
  modified_base 6: mod_base = OTHER; note = 2'-O-methyluridine
  modified_base 7: mod_base = OTHER; note = 2'-fluorocytidine
  modified_base 8: mod_base = OTHER; note = 2'-O-methylcytidine
  modified_base 9: mod_base = OTHER; note = 2'-fluoroadenosine
  modified_base 10: mod_base = OTHER; note = 2'-fluorouridine
  modified_base 11: mod_base = OTHER; note = 2'-fluorocytidine
  modified_base 12: mod_base = OTHER; note = 2'-O-methyladenosine
  modified_base 13: mod_base = OTHER; note = 2'-O-methylcytidine
  modified_base 14: mod_base = OTHER; note = 2'-O-methylguanosine
  modified_base 15: mod_base = OTHER; note = 2'-O-methylguanosine
  modified_base 16: mod_base = OTHER; note = 2'-O-methylcytidine
  modified_base 17: mod_base = OTHER; note = 2'-O-methyluridine
  modified_base 18: mod_base = OTHER; note = 2'-O-methylguanosine
  modified_base 19: mod_base = OTHER; note = 2'-O-methylcytidine
  modified_base 20: mod_base = OTHER; note = 2'-O-methyladenosine
  modified_base 21: mod_base = OTHER; note = 2'-O-methyladenosine
aactgtccatcacggctgcaa

SEQ ID NO: 852 - RNA, 21 nt, synthetic construct
  source 1..21: mol_type = other RNA
  modified_base 1: mod_base = OTHER; note = 2'-O-methyladenosine with phosphorothioate linkage
  modified_base 2: mod_base = OTHER; note = 2'-O-methylcytidine with phosphorothioate linkage
  modified_base 3: mod_base = OTHER; note = 2'-O-methyluridine
  modified_base 4: mod_base = OTHER; note = 2'-O-methylguanosine
  modified_base 5: mod_base = OTHER; note = 2'-O-methyluridine
  modified_base 6: mod_base = OTHER; note = 2'-O-methylcytidine
  modified_base 7: mod_base = OTHER; note = 2'-fluorocytidine
  modified_base 8: mod_base = OTHER; note = 2'-O-methyladenosine
  modified_base 9: mod_base = OTHER; note = 2'-fluorouridine
  modified_base 10: mod_base = OTHER; note = 2'-fluorocytidine
  modified_base 11: mod_base = OTHER; note = 2'-fluoroadenosine
  modified_base 12: mod_base = OTHER; note = 2'-O-methylcytidine
  modified_base 13: mod_base = OTHER; note = 2'-O-methylguanosine
  modified_base 14: mod_base = OTHER; note = 2'-O-methylguanosine
  modified_base 15: mod_base = OTHER; note = 2'-O-methylcytidine
  modified_base 16: mod_base = OTHER; note = 2'-O-methyluridine
  modified_base 17: mod_base = OTHER; note = 2'-O-methylguanosine
  modified_base 18: mod_base = OTHER; note = 2'-O-methylcytidine
  modified_base 19: mod_base = OTHER; note = 2'-O-methyladenosine
  modified_base 20: mod_base = OTHER; note = 2'-O-methyladenosine
  modified_base 21: mod_base = OTHER; note = 2'-O-methyladenosine
actgtccatcacggctgcaaa

SEQ ID NO: 853 - RNA, 21 nt, synthetic construct
  source 1..21: mol_type = other RNA
  modified_base 1: mod_base = OTHER; note = 2'-O-methylguanosine with phosphorothioate linkage
  modified_base 2: mod_base = OTHER; note = 2'-O-methyluridine with phosphorothioate linkage
  modified_base 3: mod_base = OTHER; note = 2'-O-methylcytidine
  modified_base 4: mod_base = OTHER; note = 2'-O-methylcytidine
  modified_base 5: mod_base = OTHER; note = 2'-O-methyladenosine
  modified_base 6: mod_base = OTHER; note = 2'-O-methyluridine
  modified_base 7: mod_base = OTHER; note = 2'-fluorocytidine
  modified_base 8: mod_base = OTHER; note = 2'-O-methyladenosine
  modified_base 9: mod_base = OTHER; note = 2'-fluorocytidine
  modified_base 10: mod_base = OTHER; note = 2'-fluoroguanosine
  modified_base 11: mod_base = OTHER; note = 2'-fluoroguanosine
  modified_base 12: mod_base = OTHER; note = 2'-O-methylcytidine
  modified_base 13: mod_base = OTHER; note = 2'-O-methyluridine
  modified_base 14: mod_base = OTHER; note = 2'-O-methylguanosine
  modified_base 15: mod_base = OTHER; note = 2'-O-methylcytidine
  modified_base 16: mod_base = OTHER; note = 2'-O-methyladenosine
  modified_base 17: mod_base = OTHER; note = 2'-O-methyladenosine
  modified_base 18: mod_base = OTHER; note = 2'-O-methylcytidine
  modified_base 19: mod_base = OTHER; note = 2'-O-methyluridine
  modified_base 20: mod_base = OTHER; note = 2'-O-methylguanosine
  modified_base 21: mod_base = OTHER; note = 2'-O-methyladenosine
gtccatcacggctgcaactga

SEQ ID NO: 854 - RNA, 21 nt, synthetic construct
  source 1..21: mol_type = other RNA
  modified_base 1: mod_base = OTHER; note = 2'-O-methyladenosine with phosphorothioate linkage
  modified_base 2: mod_base = OTHER; note = 2'-O-methyluridine with phosphorothioate linkage
  modified_base 3: mod_base = OTHER; note = 2'-O-methylcytidine
  modified_base 4: mod_base = OTHER; note = 2'-O-methyladenosine
  modified_base 5: mod_base = OTHER; note = 2'-O-methylcytidine
  modified_base 6: mod_base = OTHER; note = 2'-O-methylguanosine
  modified_base 7: mod_base = OTHER; note = 2'-fluoroguanosine
  modified_base 8: mod_base = OTHER; note = 2'-O-methylcytidine
  modified_base 9: mod_base = OTHER; note = 2'-fluorouridine
  modified_base 10: mod_base = OTHER; note = 2'-fluoroguanosine
  modified_base 11: mod_base = OTHER; note = 2'-fluorocytidine
  modified_base 12: mod_base = OTHER; note = 2'-O-methyladenosine
  modified_base 13: mod_base = OTHER; note = 2'-O-methyladenosine
  modified_base 14: mod_base = OTHER; note = 2'-O-methylcytidine
  modified_base 15: mod_base = OTHER; note = 2'-O-methyluridine
  modified_base 16: mod_base = OTHER; note = 2'-O-methylguanosine
  modified_base 17: mod_base = OTHER; note = 2'-O-methyladenosine
  modified_base 18: mod_base = OTHER; note = 2'-O-methyladenosine
  modified_base 19: mod_base = OTHER; note = 2'-O-methyladenosine
  modified_base 20: mod_base = OTHER; note = 2'-O-methyluridine
  modified_base 21: mod_base = OTHER; note = 2'-O-methyladenosine
atcacggctgcaactgaaata

SEQ ID NO: 855 - RNA, 21 nt, synthetic construct
  source 1..21: mol_type = other RNA
  modified_base 1: mod_base = OTHER; note = 2'-O-methyluridine with phosphorothioate linkage
  modified_base 2: mod_base = OTHER; note = 2'-O-methylguanosine with phosphorothioate linkage
  modified_base 3: mod_base = OTHER; note = 2'-O-methylguanosine
  modified_base 4: mod_base = OTHER; note = 2'-O-methylguanosine
  modified_base 5: mod_base = OTHER; note = 2'-O-methyladenosine
  modified_base 6: mod_base = OTHER; note = 2'-O-methylcytidine
  modified_base 7: mod_base = OTHER; note = 2'-fluoroadenosine
  modified_base 8: mod_base = OTHER; note = 2'-O-methylcytidine
  modified_base 9: mod_base = OTHER; note = 2'-fluoroadenosine
  modified_base 10: mod_base = OTHER; note = 2'-fluoroguanosine
  modified_base 11: mod_base = OTHER; note = 2'-fluorocytidine
  modified_base 12: mod_base = OTHER; note = 2'-O-methylguanosine
  modified_base 13: mod_base = OTHER; note = 2'-O-methylcytidine
  modified_base 14: mod_base = OTHER; note = 2'-O-methyladenosine
  modified_base 15: mod_base = OTHER; note = 2'-O-methylcytidine
  modified_base 16: mod_base = OTHER; note = 2'-O-methylcytidine
  modified_base 17: mod_base = OTHER; note = 2'-O-methyladenosine
  modified_base 18: mod_base = OTHER; note = 2'-O-methylguanosine
  modified_base 19: mod_base = OTHER; note = 2'-O-methyladenosine
  modified_base 20: mod_base = OTHER; note = 2'-O-methyladenosine
  modified_base 21: mod_base = OTHER; note = 2'-O-methyladenosine
tgggacacagcgcaccagaaa

SEQ ID NO: 856 - RNA, 21 nt, synthetic construct
  source 1..21: mol_type = other RNA
  modified_base 1: mod_base = OTHER; note = 2'-O-methylguanosine with phosphorothioate linkage
  modified_base 2: mod_base = OTHER; note = 2'-O-methyladenosine with phosphorothioate linkage
  modified_base 3: mod_base = OTHER; note = 2'-O-methylcytidine
  modified_base 4: mod_base = OTHER; note = 2'-O-methyladenosine
  modified_base 5: mod_base = OTHER; note = 2'-O-methylcytidine
  modified_base 6: mod_base = OTHER; note = 2'-O-methyladenosine
  modified_base 7: mod_base = OTHER; note = 2'-fluoroguanosine
  modified_base 8: mod_base = OTHER; note = 2'-O-methylcytidine
  modified_base 9: mod_base = OTHER; note = 2'-fluoroguanosine
  modified_base 10: mod_base = OTHER; note = 2'-fluorocytidine
  modified_base 11: mod_base = OTHER; note = 2'-fluoroadenosine
  modified_base 12: mod_base = OTHER; note = 2'-O-methylcytidine
  modified_base 13: mod_base = OTHER; note = 2'-O-methylcytidine
  modified_base 14: mod_base = OTHER; note = 2'-O-methyladenosine
  modified_base 15: mod_base = OTHER; note = 2'-O-methylguanosine
  modified_base 16: mod_base = OTHER; note = 2'-O-methyladenosine
  modified_base 17: mod_base = OTHER; note = 2'-O-methyladenosine
  modified_base 18: mod_base = OTHER; note = 2'-O-methylguanosine
  modified_base 19: mod_base = OTHER; note = 2'-O-methylcytidine
  modified_base 20: mod_base = OTHER; note = 2'-O-methyluridine
  modified_base 21: mod_base = OTHER; note = 2'-O-methyladenosine
gacacagcgcaccagaagcta

SEQ ID NO: 857 - RNA, 21 nt, synthetic construct
  source 1..21: mol_type = other RNA
  modified_base 1: mod_base = OTHER; note = 2'-O-methyladenosine with phosphorothioate linkage
  modified_base 2: mod_base = OTHER; note = 2'-O-methylcytidine with phosphorothioate linkage
  modified_base 3: mod_base = OTHER; note = 2'-O-methyladenosine
  modified_base 4: mod_base = OTHER; note = 2'-O-methylguanosine
  modified_base 5: mod_base = OTHER; note = 2'-O-methylcytidine
  modified_base 6: mod_base = OTHER; note = 2'-O-methylguanosine
  modified_base 7: mod_base = OTHER; note = 2'-fluorocytidine
  modified_base 8: mod_base = OTHER; note = 2'-O-methyladenosine
  modified_base 9: mod_base = OTHER; note = 2'-fluorocytidine
  modified_base 10: mod_base = OTHER; note = 2'-fluorocytidine
  modified_base 11: mod_base = OTHER; note = 2'-fluoroadenosine
  modified_base 12: mod_base = OTHER; note = 2'-O-methylguanosine
  modified_base 13: mod_base = OTHER; note = 2'-O-methyladenosine
  modified_base 14: mod_base = OTHER; note = 2'-O-methyladenosine
  modified_base 15: mod_base = OTHER; note = 2'-O-methylguanosine
  modified_base 16: mod_base = OTHER; note = 2'-O-methylcytidine
  modified_base 17: mod_base = OTHER; note = 2'-O-methyluridine
  modified_base 18: mod_base = OTHER; note = 2'-O-methyladenosine
  modified_base 19: mod_base = OTHER; note = 2'-O-methyladenosine
  modified_base 20: mod_base = OTHER; note = 2'-O-methyladenosine
  modified_base 21: mod_base = OTHER; note = 2'-O-methyladenosine
acagcgcaccagaagctaaaa

SEQ ID NO: 858 - RNA, 19 nt, synthetic construct
  source 1..19: mol_type = other RNA
  modified_base 1: mod_base = OTHER; note = 2'-O-methylguanosine with phosphorothioate linkage
  modified_base 2: mod_base = OTHER; note = 2'-O-methylcytidine with phosphorothioate linkage
  modified_base 3: mod_base = OTHER; note = 2'-O-methylcytidine
  modified_base 4: mod_base = OTHER; note = 2'-O-methyladenosine
  modified_base 5: mod_base = OTHER; note = 2'-fluorocytidine
  modified_base 6: mod_base = OTHER; note = 2'-O-methyladenosine
  modified_base 7: mod_base = OTHER; note = 2'-fluorouridine
  modified_base 8: mod_base = OTHER; note = 2'-fluorouridine
  modified_base 9: mod_base = OTHER; note = 2'-fluorocytidine
  modified_base 10: mod_base = OTHER; note = 2'-O-methyluridine
  modified_base 11: mod_base = OTHER; note = 2'-O-methyladenosine
  modified_base 12: mod_base = OTHER; note = 2'-O-methylcytidine
  modified_base 13: mod_base = OTHER; note = 2'-O-methylguanosine
  modified_base 14: mod_base = OTHER; note = 2'-O-methylguanosine
  modified_base 15: mod_base = OTHER; note = 2'-O-methylguanosine
  modified_base 16: mod_base = OTHER; note = 2'-O-methylcytidine
  modified_base 17: mod_base = OTHER; note = 2'-O-methyluridine
  modified_base 18: mod_base = OTHER; note = 2'-O-methylcytidine
  modified_base 19: mod_base = OTHER; note = 2'-O-methyladenosine
gccacattctacgggctca

SEQ ID NO: 859 - RNA, 19 nt, synthetic construct
  source 1..19: mol_type = other RNA
  modified_base 1: mod_base = OTHER; note = 2'-O-methylguanosine with phosphorothioate linkage
  modified_base 2: mod_base = OTHER; note = 2'-O-methyladenosine with phosphorothioate linkage
  modified_base 3: mod_base = OTHER; note = 2'-O-methyladenosine
  modified_base 4: mod_base = OTHER; note = 2'-O-methyladenosine
  modified_base 5: mod_base = OTHER; note = 2'-fluoroguanosine
  modified_base 6: mod_base = OTHER; note = 2'-O-methyluridine
  modified_base 7: mod_base = OTHER; note = 2'-fluoroadenosine
  modified_base 8: mod_base = OTHER; note = 2'-fluorocytidine
  modified_base 9: mod_base = OTHER; note = 2'-fluorouridine
  modified_base 10: mod_base = OTHER; note = 2'-O-methylcytidine
  modified_base 11: mod_base = OTHER; note = 2'-O-methyladenosine
  modified_base 12: mod_base = OTHER; note = 2'-O-methylguanosine
  modified_base 13: mod_base = OTHER; note = 2'-O-methylguanosine
  modified_base 14: mod_base = OTHER; note = 2'-O-methylguanosine
  modified_base 15: mod_base = OTHER; note = 2'-O-methyladenosine
  modified_base 16: mod_base = OTHER; note = 2'-O-methylguanosine
  modified_base 17: mod_base = OTHER; note = 2'-O-methylcytidine
  modified_base 18: mod_base = OTHER; note = 2'-O-methyluridine
  modified_base 19: mod_base = OTHER; note = 2'-O-methyladenosine
gaaagtactcagggagcta

SEQ ID NO: 860 - RNA, 19 nt, synthetic construct
  source 1..19: mol_type = other RNA
  modified_base 1: mod_base = OTHER; note = 2'-O-methylguanosine with phosphorothioate linkage
  modified_base 2: mod_base = OTHER; note = 2'-O-methyluridine with phosphorothioate linkage
  modified_base 3: mod_base = OTHER; note = 2'-O-methylcytidine
  modified_base 4: mod_base = OTHER; note = 2'-O-methyluridine
  modified_base 5: mod_base = OTHER; note = 2'-fluoroadenosine
  modified_base 6: mod_base = OTHER; note = 2'-O-methyluridine
  modified_base 7: mod_base = OTHER; note = 2'-fluoroadenosine
  modified_base 8: mod_base = OTHER; note = 2'-fluorocytidine
  modified_base 9: mod_base = OTHER; note = 2'-fluorocytidine
  modified_base 10: mod_base = OTHER; note = 2'-O-methylcytidine
  modified_base 11: mod_base = OTHER; note = 2'-O-methyluridine
  modified_base 12: mod_base = OTHER; note = 2'-O-methyluridine
  modified_base 13: mod_base = OTHER; note = 2'-O-methyladenosine
  modified_base 14: mod_base = OTHER; note = 2'-O-methylcytidine
  modified_base 15: mod_base = OTHER; note = 2'-O-methylcytidine
  modified_base 16: mod_base = OTHER; note = 2'-O-methyluridine
  modified_base 17: mod_base = OTHER; note = 2'-O-methylguanosine
  modified_base 18: mod_base = OTHER; note = 2'-O-methyladenosine
  modified_base 19: mod_base = OTHER; note = 2'-O-methyladenosine
gtctatacccttacctgaa

SEQ ID NO: 861 - RNA, 19 nt, synthetic construct
  source 1..19: mol_type = other RNA
  modified_base 1: mod_base = OTHER; note = 2'-O-methylguanosine with phosphorothioate linkage
  modified_base 2: mod_base = OTHER; note = 2'-O-methylcytidine with phosphorothioate linkage
  modified_base 3: mod_base = OTHER; note = 2'-O-methyluridine
  modified_base 4: mod_base = OTHER; note = 2'-O-methylguanosine
  modified_base 5: mod_base = OTHER; note = 2'-fluorocytidine
  modified_base 6: mod_base = OTHER; note = 2'-O-methyluridine
  modified_base 7: mod_base = OTHER; note = 2'-fluoroadenosine
  modified_base 8: mod_base = OTHER; note = 2'-fluoroguanosine
  modified_base 9: mod_base = OTHER; note = 2'-fluorocytidine
  modified_base 10: mod_base = OTHER; note = 2'-O-methylcytidine
  modified_base 11: mod_base = OTHER; note = 2'-O-methyladenosine
  modified_base 12: mod_base = OTHER; note = 2'-O-methyladenosine
  modified_base 13: mod_base = OTHER; note = 2'-O-methyladenosine
  modified_base 14: mod_base = OTHER; note = 2'-O-methylguanosine
  modified_base 15: mod_base = OTHER; note = 2'-O-methylcytidine
  modified_base 16: mod_base = OTHER; note = 2'-O-methyladenosine
  modified_base 17: mod_base = OTHER; note = 2'-O-methyluridine
  modified_base 18: mod_base = OTHER; note = 2'-O-methyluridine
  modified_base 19: mod_base = OTHER; note = 2'-O-methyladenosine
gctgctagccaaagcatta

SEQ ID NO: 862 - RNA, 19 nt, synthetic construct
  source 1..19: mol_type = other RNA
  modified_base 1: mod_base = OTHER; note = 2'-O-methylguanosine with phosphorothioate linkage
  modified_base 2: mod_base = OTHER; note = 2'-O-methylguanosine with phosphorothioate linkage
  modified_base 3: mod_base = OTHER; note = 2'-O-methyladenosine
  modified_base 4: mod_base = OTHER; note = 2'-O-methylguanosine
  modified_base 5: mod_base = OTHER; note = 2'-fluorouridine
  modified_base 6: mod_base = OTHER; note = 2'-O-methylguanosine
  modified_base 7: mod_base = OTHER; note = 2'-fluoroguanosine
  modified_base 8: mod_base = OTHER; note = 2'-fluoroadenosine
  modified_base 9: mod_base = OTHER; note = 2'-fluoroguanosine
  modified_base 10: mod_base = OTHER; note = 2'-O-methyluridine
  modified_base 11: mod_base = OTHER; note = 2'-O-methylguanosine
  modified_base 12: mod_base = OTHER; note = 2'-O-methylcytidine
  modified_base 13: mod_base = OTHER; note = 2'-O-methyluridine
  modified_base 14: mod_base = OTHER; note = 2'-O-methylguanosine
  modified_base 15: mod_base = OTHER; note = 2'-O-methyluridine
  modified_base 16: mod_base = OTHER; note = 2'-O-methylcytidine
  modified_base 17: mod_base = OTHER; note = 2'-O-methyladenosine
  modified_base 18: mod_base = OTHER; note = 2'-O-methyluridine
  modified_base 19: mod_base = OTHER; note = 2'-O-methyladenosine
ggagtggagtgctgtcata

SEQ ID NO: 863 - RNA, 19 nt, synthetic construct
  source 1..19: mol_type = other RNA
  modified_base 1: mod_base = OTHER; note = 2'-O-methylguanosine with phosphorothioate linkage
  modified_base 2: mod_base = OTHER; note = 2'-O-methylguanosine with phosphorothioate linkage
  modified_base 3: mod_base = OTHER; note = 2'-O-methylcytidine
  modified_base 4: mod_base = OTHER; note = 2'-O-methylcytidine
  modified_base 5: mod_base = OTHER; note = 2'-fluoroadenosine
  modified_base 6: mod_base = OTHER; note = 2'-O-methyladenosine
  modified_base 7: mod_base = OTHER; note = 2'-fluoroguanosine
  modified_base 8: mod_base = OTHER; note = 2'-fluoroadenosine
  modified_base 9: mod_base = OTHER; note = 2'-fluorouridine
  modified_base 10: mod_base = OTHER; note = 2'-O-methylcytidine
  modified_base 11: mod_base = OTHER; note = 2'-O-methyladenosine
  modified_base 12: mod_base = OTHER; note = 2'-O-methyladenosine
  modified_base 13: mod_base = OTHER; note = 2'-O-methylguanosine
  modified_base 14: mod_base = OTHER; note = 2'-O-methyladenosine
  modified_base 15: mod_base = OTHER; note = 2'-O-methyluridine
  modified_base 16: mod_base = OTHER; note = 2'-O-methylguanosine
  modified_base 17: mod_base = OTHER; note = 2'-O-methyluridine
  modified_base 18: mod_base = OTHER; note = 2'-O-methylcytidine
  modified_base 19: mod_base = OTHER; note = 2'-O-methyladenosine
ggccaagatcaagatgtca

SEQ ID NO: 864 - RNA, 19 nt, synthetic construct
  source 1..19: mol_type = other RNA
  modified_base 1: mod_base = OTHER; note = 2'-O-methylcytidine with phosphorothioate linkage
  modified_base 2: mod_base = OTHER; note = 2'-O-methyluridine with phosphorothioate linkage
  modified_base 3: mod_base = OTHER; note = 2'-O-methyluridine
  modified_base 4: mod_base = OTHER; note = 2'-O-methylguanosine
  modified_base 5: mod_base = OTHER; note = 2'-fluoroadenosine
  modified_base 6: mod_base = OTHER; note = 2'-O-methylguanosine
  modified_base 7: mod_base = OTHER; note = 2'-fluoroadenosine
  modified_base 8: mod_base = OTHER; note = 2'-fluorouridine
  modified_base 9: mod_base = OTHER; note = 2'-fluorocytidine
  modified_base 10: mod_base = OTHER; note = 2'-O-methyluridine
  modified_base 11: mod_base = OTHER; note = 2'-O-methylguanosine
  modified_base 12: mod_base = OTHER; note = 2'-O-methyluridine
  modified_base 13: mod_base = OTHER; note = 2'-O-methylcytidine
  modified_base 14: mod_base = OTHER; note = 2'-O-methyluridine
  modified_base 15: mod_base = OTHER; note = 2'-O-methyluridine
  modified_base 16: mod_base = OTHER; note = 2'-O-methylcytidine
  modified_base 17: mod_base = OTHER; note = 2'-O-methyladenosine
  modified_base 18: mod_base = OTHER; note = 2'-O-methyluridine
  modified_base 19: mod_base = OTHER; note = 2'-O-methyladenosine
cttgagatctgtcttcata

SEQ ID NO: 865 - RNA, 19 nt, synthetic construct
  source 1..19: mol_type = other RNA
  modified_base 1: mod_base = OTHER; note = 2'-O-methylcytidine with phosphorothioate linkage
  modified_base 2: mod_base = OTHER; note = 2'-O-methylcytidine with phosphorothioate linkage
  modified_base 3: mod_base = OTHER; note = 2'-O-methyluridine
  modified_base 4: mod_base = OTHER; note = 2'-O-methylcytidine
  modified_base 5: mod_base = OTHER; note = 2'-fluoroadenosine
  modified_base 6: mod_base = OTHER; note = 2'-O-methyladenosine
  modified_base 7: mod_base = OTHER; note = 2'-fluoroadenosine
  modified_base 8: mod_base = OTHER; note = 2'-fluorocytidine
  modified_base 9: mod_base = OTHER; note = 2'-fluorouridine
  modified_base 10: mod_base = OTHER; note = 2'-O-methyladenosine
  modified_base 11: mod_base = OTHER; note = 2'-O-methyladenosine
  modified_base 12: mod_base = OTHER; note = 2'-O-methylcytidine
  modified_base 13: mod_base = OTHER; note = 2'-O-methyladenosine
  modified_base 14: mod_base = OTHER; note = 2'-O-methyladenosine
  modified_base 15: mod_base = OTHER; note = 2'-O-methyladenosine
  modified_base 16: mod_base = OTHER; note = 2'-O-methyladenosine
  modified_base 17: mod_base = OTHER; note = 2'-O-methyladenosine
  modified_base 18: mod_base = OTHER; note = 2'-O-methylcytidine
  modified_base 19: mod_base = OTHER; note = 2'-O-methyladenosine
cctcaaactaacaaaaaca

SEQ ID NO: 866 - RNA, 19 nt, synthetic construct
  source 1..19: mol_type = other RNA
  modified_base 1: mod_base = OTHER; note = 2'-O-methylcytidine with phosphorothioate linkage
  modified_base 2: mod_base = OTHER; note = 2'-O-methyluridine with phosphorothioate linkage
  modified_base 3: mod_base = OTHER; note = 2'-O-methylcytidine
  modified_base 4: mod_base = OTHER; note = 2'-O-methyladenosine
  modified_base 5: mod_base = OTHER; note = 2'-fluoroadenosine
  modified_base 6: mod_base = OTHER; note = 2'-O-methyladenosine
  modified_base 7: mod_base = OTHER; note = 2'-fluorocytidine
  modified_base 8: mod_base = OTHER; note = 2'-fluorouridine
  modified_base 9: mod_base = OTHER; note = 2'-fluoroadenosine
  modified_base 10: mod_base = OTHER; note = 2'-O-methyladenosine
  modified_base 11: mod_base = OTHER; note = 2'-O-methylcytidine
  modified_base 12: mod_base = OTHER; note = 2'-O-methyladenosine
  modified_base 13: mod_base = OTHER; note = 2'-O-methyladenosine
  modified_base 14: mod_base = OTHER; note = 2'-O-methyladenosine
  modified_base 15: mod_base = OTHER; note = 2'-O-methyladenosine
  modified_base 16: mod_base = OTHER; note = 2'-O-methyladenosine
  modified_base 17: mod_base = OTHER; note = 2'-O-methylcytidine
  modified_base 18: mod_base = OTHER; note = 2'-O-methyladenosine
  modified_base 19: mod_base = OTHER; note = 2'-O-methyladenosine
ctcaaactaacaaaaacaa

SEQ ID NO: 867 - RNA, 19 nt, synthetic construct
  source 1..19: mol_type = other RNA
  modified_base 1: mod_base = OTHER; note = 2'-O-methylcytidine with phosphorothioate linkage
  modified_base 2: mod_base = OTHER; note = 2'-O-methyladenosine with phosphorothioate linkage
  modified_base 3: mod_base = OTHER; note = 2'-O-methyladenosine
  modified_base 4: mod_base = OTHER; note = 2'-O-methyladenosine
  modified_base 5: mod_base = OTHER; note = 2'-fluorocytidine
  modified_base 6: mod_base = OTHER; note = 2'-O-methyluridine
  modified_base 7: mod_base = OTHER; note = 2'-fluoroadenosine
  modified_base 8: mod_base = OTHER; note = 2'-fluoroadenosine
  modified_base 9: mod_base = OTHER; note = 2'-fluorocytidine
  modified_base 10: mod_base = OTHER; note = 2'-O-methyladenosine
  modified_base 11: mod_base = OTHER; note = 2'-O-methyladenosine
  modified_base 12: mod_base = OTHER; note = 2'-O-methyladenosine
  modified_base 13: mod_base = OTHER; note = 2'-O-methyladenosine
  modified_base 14: mod_base = OTHER; note = 2'-O-methyladenosine
  modified_base 15: mod_base = OTHER; note = 2'-O-methylcytidine
  modified_base 16: mod_base = OTHER; note = 2'-O-methyladenosine
  modified_base 17: mod_base = OTHER; note = 2'-O-methyluridine
  modified_base 18: mod_base = OTHER; note = 2'-O-methyluridine
  modified_base 19: mod_base = OTHER; note = 2'-O-methyladenosine
caaactaacaaaaacatta

SEQ ID NO: 868 - RNA, 19 nt, synthetic construct
  source 1..19: mol_type = other RNA
  modified_base 1: mod_base = OTHER; note = 2'-O-methylcytidine with phosphorothioate linkage
  modified_base 2: mod_base = OTHER; note = 2'-O-methyluridine with phosphorothioate linkage
  modified_base 3: mod_base = OTHER; note = 2'-O-methyladenosine
  modified_base 4: mod_base = OTHER; note = 2'-O-methyladenosine
  modified_base 5: mod_base = OTHER; note = 2'-fluorocytidine
  modified_base 6: mod_base = OTHER; note = 2'-O-methyladenosine
  modified_base 7: mod_base = OTHER; note = 2'-fluoroadenosine
  modified_base 8: mod_base = OTHER; note = 2'-fluoroadenosine
  modified_base 9: mod_base = OTHER; note = 2'-fluoroadenosine
  modified_base 10: mod_base = OTHER; note = 2'-O-methyladenosine
  modified_base 11: mod_base = OTHER; note = 2'-O-methylcytidine
  modified_base 12: mod_base = OTHER; note = 2'-O-methyladenosine
  modified_base 13: mod_base = OTHER; note = 2'-O-methyluridine
  modified_base 14: mod_base = OTHER; note = 2'-O-methyluridine
  modified_base 15: mod_base = OTHER; note = 2'-O-methyluridine
  modified_base 16: mod_base = OTHER; note = 2'-O-methylcytidine
  modified_base 17: mod_base = OTHER; note = 2'-O-methylcytidine
  modified_base 18: mod_base = OTHER; note = 2'-O-methyladenosine
  modified_base 19: mod_base = OTHER; note = 2'-O-methyladenosine
ctaacaaaaacatttccaa

SEQ ID NO: 869 - RNA, 19 nt, synthetic construct
  source 1..19: mol_type = other RNA
  modified_base 1: mod_base = OTHER; note = 2'-O-methylcytidine with phosphorothioate linkage
  modified_base 2: mod_base = OTHER; note = 2'-O-methyladenosine with phosphorothioate linkage
  modified_base 3: mod_base = OTHER; note = 2'-O-methyladenosine
  modified_base 4: mod_base = OTHER; note = 2'-O-methyladenosine
  modified_base 5: mod_base = OTHER; note = 2'-fluoroadenosine
  modified_base 6: mod_base = OTHER; note = 2'-O-methyladenosine
  modified_base 7: mod_base = OTHER; note = 2'-fluorocytidine
  modified_base 8: mod_base = OTHER; note = 2'-fluoroadenosine
  modified_base 9: mod_base = OTHER; note = 2'-fluorouridine
  modified_base 10: mod_base = OTHER; note = 2'-O-methyluridine
  modified_base 11: mod_base = OTHER; note = 2'-O-methyluridine
  modified_base 12: mod_base = OTHER; note = 2'-O-methylcytidine
  modified_base 13: mod_base = OTHER; note = 2'-O-methylcytidine
  modified_base 14: mod_base = OTHER; note = 2'-O-methyladenosine
  modified_base 15: mod_base = OTHER; note = 2'-O-methyladenosine
  modified_base 16: mod_base = OTHER; note = 2'-O-methyluridine
  modified_base 17: mod_base = OTHER; note = 2'-O-methyladenosine
  modified_base 18: mod_base = OTHER; note = 2'-O-methyladenosine
  modified_base 19: mod_base = OTHER; note = 2'-O-methyladenosine
caaaaacatttccaataaa

SEQ ID NO: 870 - RNA, 19 nt, synthetic construct
  source 1..19: mol_type = other RNA
  modified_base 1: mod_base = OTHER; note = 2'-O-methylcytidine with phosphorothioate linkage
  modified_base 2: mod_base = OTHER; note = 2'-O-methylcytidine with phosphorothioate linkage
  modified_base 3: mod_base = OTHER; note = 2'-O-methyladenosine
  modified_base 4: mod_base = OTHER; note = 2'-O-methyladenosine
  modified_base 5: mod_base = OTHER; note = 2'-fluorouridine
  modified_base 6: mod_base = OTHER; note = 2'-O-methyladenosine
  modified_base 7: mod_base = OTHER; note = 2'-fluoroadenosine
  modified_base 8: mod_base = OTHER; note = 2'-fluoroadenosine
  modified_base 9: mod_base = OTHER; note = 2'-fluoroadenosine
  modified_base 10: mod_base = OTHER; note = 2'-O-methyladenosine
  modified_base 11: mod_base = OTHER; note = 2'-O-methyluridine
  modified_base 12: mod_base = OTHER; note = 2'-O-methyladenosine
  modified_base 13: mod_base = OTHER; note = 2'-O-methyluridine
  modified_base 14: mod_base = OTHER; note = 2'-O-methylcytidine
  modified_base 15: mod_base = OTHER; note = 2'-O-methyladenosine
  modified_base 16: mod_base = OTHER; note = 2'-O-methyladenosine
  modified_base 17: mod_base = OTHER; note = 2'-O-methyladenosine
  modified_base 18: mod_base = OTHER; note = 2'-O-methyluridine
  modified_base 19: mod_base = OTHER; note = 2'-O-methyladenosine
ccaataaaaatatcaaata

SEQ ID NO: 871 - RNA, 19 nt, synthetic construct
  source 1..19: mol_type = other RNA
  modified_base 1: mod_base = OTHER; note = 2'-O-methylcytidine with phosphorothioate linkage
  modified_base 2: mod_base = OTHER; note = 2'-O-methyladenosine with phosphorothioate linkage
  modified_base 3: mod_base = OTHER; note = 2'-O-methyladenosine
  modified_base 4: mod_base = OTHER; note = 2'-O-methyluridine
  modified_base 5: mod_base = OTHER; note = 2'-fluoroadenosine
  modified_base 6: mod_base = OTHER; note = 2'-O-methyladenosine
  modified_base 7: mod_base = OTHER; note = 2'-fluoroadenosine
  modified_base 8: mod_base = OTHER; note = 2'-fluoroadenosine
  modified_base 9: mod_base = OTHER; note = 2'-fluoroadenosine
  modified_base 10: mod_base = OTHER; note = 2'-O-methyluridine
  modified_base 11: mod_base = OTHER; note = 2'-O-methyladenosine
  modified_base 12: mod_base = OTHER; note = 2'-O-methyluridine
  modified_base 13: mod_base = OTHER; note = 2'-O-methylcytidine
  modified_base 14: mod_base = OTHER; note = 2'-O-methyladenosine
  modified_base 15: mod_base = OTHER; note = 2'-O-methyladenosine
  modified_base 16: mod_base = OTHER; note = 2'-O-methyladenosine
  modified_base 17: mod_base = OTHER; note = 2'-O-methyluridine
  modified_base 18: mod_base = OTHER; note = 2'-O-methyladenosine
  modified_base 19: mod_base = OTHER; note = 2'-O-methyladenosine
caataaaaatatcaaataa

SEQ ID NO: 872 - RNA, 19 nt, synthetic construct
  source 1..19: mol_type = other RNA
  modified_base 1: mod_base = OTHER; note = 2'-O-methylcytidine with phosphorothioate linkage
  modified_base 2: mod_base = OTHER; note = 2'-O-methylcytidine with phosphorothioate linkage
  modified_base 3: mod_base = OTHER; note = 2'-O-methyladenosine
  modified_base 4: mod_base = OTHER; note = 2'-O-methyladenosine
  modified_base 5: mod_base = OTHER; note = 2'-fluoroadenosine
  modified_base 6: mod_base = OTHER; note = 2'-O-methylguanosine
  modified_base 7: mod_base = OTHER; note = 2'-fluorocytidine
  modified_base 8: mod_base = OTHER; note = 2'-fluoroadenosine
  modified_base 9: mod_base = OTHER; note = 2'-fluorouridine
  modified_base 10: mod_base = OTHER; note = 2'-O-methyluridine
  modified_base 11: mod_base = OTHER; note = 2'-O-methylguanosine
  modified_base 12: mod_base = OTHER; note = 2'-O-methylguanosine
  modified_base 13: mod_base = OTHER; note = 2'-O-methyladenosine
  modified_base 14: mod_base = OTHER; note = 2'-O-methylguanosine
  modified_base 15: mod_base = OTHER; note = 2'-O-methyladenosine
  modified_base 16: mod_base = OTHER; note = 2'-O-methylcytidine
  modified_base 17: mod_base = OTHER; note = 2'-O-methylcytidine
  modified_base 18: mod_base = OTHER; note = 2'-O-methylcytidine
  modified_base 19: mod_base = OTHER; note = 2'-O-methyladenosine
ccaaagcattggagaccca

SEQ ID NO: 873 - RNA, 19 nt, synthetic construct
  source 1..19: mol_type = other RNA
  modified_base 1: mod_base = OTHER; note = 2'-O-methylcytidine with phosphorothioate linkage
  modified_base 2: mod_base = OTHER; note = 2'-O-methyladenosine with phosphorothioate linkage
  modified_base 3: mod_base = OTHER; note = 2'-O-methylguanosine
  modified_base 4: mod_base = OTHER; note = 2'-O-methylguanosine
  modified_base 5: mod_base = OTHER; note = 2'-fluorouridine
  modified_base 6: mod_base = OTHER; note = 2'-O-methylcytidine
  modified_base 7: mod_base = OTHER; note = 2'-fluoroadenosine
  modified_base 8: mod_base = OTHER; note = 2'-fluoroguanosine
  modified_base 9: mod_base = OTHER; note = 2'-fluorouridine
  modified_base 10: mod_base = OTHER; note = 2'-O-methyladenosine
  modified_base 11: mod_base = OTHER; note = 2'-O-methyluridine
  modified_base 12: mod_base = OTHER; note = 2'-O-methylcytidine
  modified_base 13: mod_base = OTHER; note = 2'-O-methyluridine
  modified_base 14: mod_base = OTHER; note = 2'-O-methyladenosine
  modified_base 15: mod_base = OTHER; note = 2'-O-methyladenosine
  modified_base 16: mod_base = OTHER; note = 2'-O-methyluridine
  modified_base 17: mod_base = OTHER; note = 2'-O-methyladenosine
  modified_base 18: mod_base = OTHER; note = 2'-O-methyluridine
  modified_base 19: mod_base = OTHER; note = 2'-O-methyladenosine
caggtcagtatctaatata

SEQ ID NO: 874 - RNA, 19 nt, synthetic construct
  source 1..19: mol_type = other RNA
  modified_base 1: mod_base = OTHER; note = 2'-O-methyladenosine with phosphorothioate linkage
  modified_base 2: mod_base = OTHER; note = 2'-O-methyluridine with phosphorothioate linkage
  modified_base 3: mod_base = OTHER; note = 2'-O-methylguanosine
  modified_base 4: mod_base = OTHER; note = 2'-O-methyluridine
  modified_base 5: mod_base = OTHER; note = 2'-fluorocytidine
  modified_base 6: mod_base = OTHER; note = 2'-O-methyladenosine
  modified_base 7: mod_base = OTHER; note = 2'-fluoroadenosine
  modified_base 8: mod_base = OTHER; note = 2'-fluoroadenosine
  modified_base 9: mod_base = OTHER; note = 2'-fluoroguanosine
  modified_base 10: mod_base = OTHER; note = 2'-O-methylcytidine
  modified_base 11: mod_base = OTHER; note = 2'-O-methylcytidine
  modified_base 12: mod_base = OTHER; note = 2'-O-methyladenosine
  modified_base 13: mod_base = OTHER; note = 2'-O-methylcytidine
  modified_base 14: mod_base = OTHER; note = 2'-O-methyladenosine
  modified_base 15: mod_base = OTHER; note = 2'-O-methyluridine
  modified_base 16: mod_base = OTHER; note = 2'-O-methyluridine
  modified_base 17: mod_base = OTHER; note = 2'-O-methylcytidine
  modified_base 18: mod_base = OTHER; note = 2'-O-methyluridine
  modified_base 19: mod_base = OTHER; note = 2'-O-methyladenosine
atgtcaaagccacattcta

SEQ ID NO: 875 - RNA, 19 nt, synthetic construct
  source 1..19: mol_type = other RNA
  modified_base 1: mod_base = OTHER; note = 2'-O-methylguanosine with phosphorothioate linkage
  modified_base 2: mod_base = OTHER; note = 2'-O-methylcytidine with phosphorothioate linkage
  modified_base 3: mod_base = OTHER; note = 2'-O-methyluridine
  modified_base 4: mod_base = OTHER; note = 2'-O-methylcytidine
  modified_base 5: mod_base = OTHER; note = 2'-fluorouridine
  modified_base 6: mod_base = OTHER; note = 2'-O-methyladenosine
  modified_base 7: mod_base = OTHER; note = 2'-fluorocytidine
  modified_base 8: mod_base = OTHER; note = 2'-fluorouridine
  modified_base 9: mod_base = OTHER; note = 2'-fluorocytidine
  modified_base 10: mod_base = OTHER; note = 2'-O-methyluridine
  modified_base 11: mod_base = OTHER; note = 2'-O-methyladenosine
  modified_base 12: mod_base = OTHER; note = 2'-O-methyluridine
  modified_base 13: mod_base = OTHER; note = 2'-O-methylguanosine
  modified_base 14: mod_base = OTHER; note = 2'-O-methyladenosine
  modified_base 15: mod_base = OTHER; note = 2'-O-methylguanosine
  modified_base 16: mod_base = OTHER; note = 2'-O-methyluridine
  modified_base 17: mod_base = OTHER; note = 2'-O-methyluridine
  modified_base 18: mod_base = OTHER; note = 2'-O-methylguanosine
  modified_base 19: mod_base = OTHER; note = 2'-O-methyladenosine
gctctactctatgagttga

SEQ ID NO: 876 - RNA, 19 nt, synthetic construct
  source 1..19: mol_type = other RNA
  modified_base 1: mod_base = OTHER; note = 2'-O-methylcytidine with phosphorothioate linkage
  modified_base 2: mod_base = OTHER; note = 2'-O-methyluridine with phosphorothioate linkage
  modified_base 3: mod_base = OTHER; note = 2'-O-methyladenosine
  modified_base 4: mod_base = OTHER; note = 2'-O-methyluridine
  modified_base 5: mod_base = OTHER; note = 2'-fluoroguanosine
  modified_base 6: mod_base = OTHER; note = 2'-O-methyladenosine
  modified_base 7: mod_base = OTHER; note = 2'-fluoroguanosine
  modified_base 8: mod_base = OTHER; note = 2'-fluorouridine
  modified_base 9: mod_base = OTHER; note = 2'-fluorouridine
  modified_base 10: mod_base = OTHER; note = 2'-O-methylguanosine
  modified_base 11: mod_base = OTHER; note = 2'-O-methyluridine
  modified_base 12: mod_base = OTHER; note = 2'-O-methylguanosine
  modified_base 13: mod_base = OTHER; note = 2'-O-methyladenosine
  modified_base 14: mod_base = OTHER; note = 2'-O-methylcytidine
  modified_base 15: mod_base = OTHER; note = 2'-O-methyluridine
  modified_base 16: mod_base = OTHER; note = 2'-O-methyluridine
  modified_base 17: mod_base = OTHER; note = 2'-O-methyluridine
  modified_base 18: mod_base = OTHER; note = 2'-O-methylcytidine
  modified_base 19: mod_base = OTHER; note = 2'-O-methyladenosine
ctatgagttgtgactttca

SEQ ID NO: 877 - RNA, 19 nt, synthetic construct
  source 1..19: mol_type = other RNA
  modified_base 1: mod_base = OTHER; note = 2'-O-methyluridine with phosphorothioate linkage
  modified_base 2: mod_base = OTHER; note = 2'-O-methyladenosine with phosphorothioate linkage
  modified_base 3: mod_base = OTHER; note = 2'-O-methyluridine
  modified_base 4: mod_base = OTHER; note = 2'-O-methylguanosine
  modified_base 5: mod_base = OTHER; note = 2'-fluoroadenosine
  modified_base 6: mod_base = OTHER; note = 2'-O-methylguanosine
  modified_base 7: mod_base = OTHER; note = 2'-fluorouridine
  modified_base 8: mod_base = OTHER; note = 2'-fluorouridine
  modified_base 9: mod_base = OTHER; note = 2'-fluoroguanosine
  modified_base 10: mod_base = OTHER; note = 2'-O-methyluridine
  modified_base 11: mod_base = OTHER; note = 2'-O-methylguanosine
  modified_base 12: mod_base = OTHER; note = 2'-O-methyladenosine
  modified_base 13: mod_base = OTHER; note = 2'-O-methylcytidine
  modified_base 14: mod_base = OTHER; note = 2'-O-methyluridine
  modified_base 15: mod_base = OTHER; note = 2'-O-methyluridine
  modified_base 16: mod_base = OTHER; note = 2'-O-methyluridine
  modified_base 17: mod_base = OTHER; note = 2'-O-methylcytidine
  modified_base 18: mod_base = OTHER; note = 2'-O-methyladenosine
  modified_base 19: mod_base = OTHER; note = 2'-O-methyladenosine
tatgagttgtgactttcaa

SEQ ID NO: 878 - RNA, 19 nt, synthetic construct
  source 1..19: mol_type = other RNA
  modified_base 1: mod_base = OTHER; note = 2'-O-methylguanosine with phosphorothioate linkage
  modified_base 2: mod_base = OTHER; note = 2'-O-methylguanosine with phosphorothioate linkage
  modified_base 3: mod_base = OTHER; note = 2'-O-methylcytidine
  modified_base 4: mod_base = OTHER; note = 2'-O-methylcytidine
  modified_base 5: mod_base = OTHER; note = 2'-fluorocytidine
  modified_base 6: mod_base = OTHER; note = 2'-O-methyladenosine
  modified_base 7: mod_base = OTHER; note = 2'-fluoroadenosine
  modified_base 8: mod_base = OTHER; note = 2'-fluoroadenosine
  modified_base 9: mod_base = OTHER; note = 2'-fluoroguanosine
  modified_base 10: mod_base = OTHER; note = 2'-O-methyladenosine
  modified_base 11: mod_base = OTHER; note = 2'-O-methyladenosine
  modified_base 12: mod_base = OTHER; note = 2'-O-methyladenosine
  modified_base 13: mod_base = OTHER; note = 2'-O-methylguanosine
  modified_base 14: mod_base = OTHER; note = 2'-O-methyluridine
  modified_base 15: mod_base = OTHER; note = 2'-O-methyladenosine
  modified_base 16: mod_base = OTHER; note = 2'-O-methylcytidine
  modified_base 17: mod_base = OTHER; note = 2'-O-methyluridine
  modified_base 18: mod_base = OTHER; note = 2'-O-methylcytidine
  modified_base 19: mod_base = OTHER; note = 2'-O-methyladenosine
ggcccaaagaaagtactca

SEQ ID NO: 879 - RNA, 19 nt, synthetic construct
  source 1..19: mol_type = other RNA
  modified_base 1: mod_base = OTHER; note = 2'-O-methylguanosine with phosphorothioate linkage
  modified_base 2: mod_base = OTHER; note = 2'-O-methylcytidine with phosphorothioate linkage
  modified_base 3: mod_base = OTHER; note = 2'-O-methylcytidine
  modified_base 4: mod_base = OTHER; note = 2'-O-methyladenosine
  modified_base 5: mod_base = OTHER; note = 2'-fluorouridine
  modified_base 6: mod_base = OTHER; note = 2'-O-methyladenosine
  modified_base 7: mod_base = OTHER; note = 2'-fluorouridine
  modified_base 8: mod_base = OTHER; note = 2'-fluoroguanosine
  modified_base 9: mod_base = OTHER; note = 2'-fluorouridine
  modified_base 10: mod_base = OTHER; note = 2'-O-methyluridine
  modified_base 11: mod_base = OTHER; note = 2'-O-methylguanosine
  modified_base 12: mod_base = OTHER; note = 2'-O-methylcytidine
  modified_base 13: mod_base = OTHER; note = 2'-O-methyluridine
  modified_base 14: mod_base = OTHER; note = 2'-O-methylguanosine
  modified_base 15: mod_base = OTHER; note = 2'-O-methylguanosine
  modified_base 16: mod_base = OTHER; note = 2'-O-methylguanosine
  modified_base 17: mod_base = OTHER; note = 2'-O-methyladenosine
  modified_base 18: mod_base = OTHER; note = 2'-O-methyladenosine
  modified_base 19: mod_base = OTHER; note = 2'-O-methyladenosine
gccatatgttgctgggaaa

SEQ ID NO: 880 - RNA, 19 nt, synthetic construct
  source 1..19: mol_type = other RNA
  modified_base 1: mod_base = OTHER; note = 2'-O-methylcytidine with phosphorothioate linkage
  modified_base 2: mod_base = OTHER; note = 2'-O-methylcytidine with phosphorothioate linkage
  modified_base 3: mod_base = OTHER; note = 2'-O-methylcytidine
  modified_base 4: mod_base = OTHER; note = 2'-O-methyladenosine
  modified_base 5: mod_base = OTHER; note = 2'-fluorocytidine
  modified_base 6: mod_base = OTHER; note = 2'-O-methyluridine
  modified_base 7: mod_base = OTHER; note = 2'-fluoroguanosine
  modified_base 8: mod_base = OTHER; note = 2'-fluorocytidine
  modified_base 9: mod_base = OTHER; note = 2'-fluoroadenosine
  modified_base 10: mod_base = OTHER; note = 2'-O-methyladenosine
  modified_base 11: mod_base = OTHER; note = 2'-O-methyladenosine
  modified_base 12: mod_base = OTHER; note = 2'-O-methylguanosine
  modified_base 13: mod_base = OTHER; note = 2'-O-methyladenosine
  modified_base 14: mod_base = OTHER; note = 2'-O-methylcytidine
  modified_base 15: mod_base = OTHER; note = 2'-O-methyluridine
  modified_base 16: mod_base = OTHER; note = 2'-O-methyladenosine
  modified_base 17: mod_base = OTHER; note = 2'-O-methyluridine
  modified_base 18: mod_base = OTHER; note = 2'-O-methylguanosine
  modified_base 19: mod_base = OTHER; note = 2'-O-methyladenosine
cccactgcaaagactatga

SEQ ID NO: 881 - RNA, 19 nt, synthetic construct
  source 1..19: mol_type = other RNA
  modified_base 1: mod_base = OTHER; note = 2'-O-methylguanosine with phosphorothioate linkage
  modified_base 2: mod_base = OTHER; note = 2'-O-methyladenosine with phosphorothioate linkage
  modified_base 3: mod_base = OTHER; note = 2'-O-methylcytidine
  modified_base 4: mod_base = OTHER; note = 2'-O-methyluridine
  modified_base 5: mod_base = OTHER; note = 2'-fluoroadenosine
  modified_base 6: mod_base = OTHER; note = 2'-O-methyluridine
  modified_base 7: mod_base = OTHER; note = 2'-fluoroguanosine
  modified_base 8: mod_base = OTHER; note = 2'-fluoroadenosine
  modified_base 9: mod_base = OTHER; note = 2'-fluorocytidine
  modified_base 10: mod_base = OTHER; note = 2'-O-methyladenosine
  modified_base 11: mod_base = OTHER; note = 2'-O-methylguanosine
  modified_base 12: mod_base = OTHER; note = 2'-O-methylcytidine
  modified_base 13: mod_base = OTHER; note = 2'-O-methyladenosine
  modified_base 14: mod_base = OTHER; note = 2'-O-methyluridine
  modified_base 15: mod_base = OTHER; note = 2'-O-methylcytidine
  modified_base 16: mod_base = OTHER; note = 2'-O-methyladenosine
  modified_base 17: mod_base = OTHER; note = 2'-O-methyladenosine
  modified_base 18: mod_base = OTHER; note = 2'-O-methyladenosine
  modified_base 19: mod_base = OTHER; note = 2'-O-methyladenosine
gactatgacagcatcaaaa

SEQ ID NO: 882 - RNA, 19 nt, synthetic construct
  source 1..19: mol_type = other RNA
  modified_base 1: mod_base = OTHER; note = 2'-O-methylcytidine with phosphorothioate linkage
  modified_base 2: mod_base = OTHER; note = 2'-O-methyluridine with phosphorothioate linkage
  modified_base 3: mod_base = OTHER; note = 2'-O-methyladenosine
  modified_base 4: mod_base = OTHER; note = 2'-O-methyluridine
  modified_base 5: mod_base = OTHER; note = 2'-fluoroguanosine
  modified_base 6: mod_base = OTHER; note = 2'-O-methyladenosine
  modified_base 7: mod_base = OTHER; note = 2'-fluorocytidine
  modified_base 8: mod_base = OTHER; note = 2'-fluoroadenosine
  modified_base 9: mod_base = OTHER; note = 2'-fluoroguanosine
  modified_base 10: mod_base = OTHER; note = 2'-O-methylcytidine
  modified_base 11: mod_base = OTHER; note = 2'-O-methyladenosine
  modified_base 12: mod_base = OTHER; note = 2'-O-methyluridine
  modified_base 13: mod_base = OTHER; note = 2'-O-methylcytidine
  modified_base 14: mod_base = OTHER; note = 2'-O-methyladenosine
  modified_base 15: mod_base = OTHER; note = 2'-O-methyladenosine
  modified_base 16: mod_base = OTHER; note = 2'-O-methyladenosine
  modified_base 17: mod_base = OTHER; note = 2'-O-methyluridine
  modified_base 18: mod_base = OTHER; note = 2'-O-methyluridine
  modified_base 19: mod_base = OTHER; note = 2'-O-methyladenosine
ctatgacagcatcaaatta

SEQ ID NO: 883 - RNA, 19 nt, synthetic construct
  source 1..19: mol_type = other RNA
  modified_base 1: mod_base = OTHER; note = 2'-O-methylcytidine with phosphorothioate linkage
  modified_base 2: mod_base = OTHER; note = 2'-O-methyluridine with phosphorothioate linkage
  modified_base 3: mod_base = OTHER; note = 2'-O-methylguanosine
  modified_base 4: mod_base = OTHER; note = 2'-O-methyladenosine
  modified_base 5: mod_base = OTHER; note = 2'-fluoroadenosine
  modified_base 6: mod_base = OTHER; note = 2'-O-methylguanosine
  modified_base 7: mod_base = OTHER; note = 2'-fluoroadenosine
  modified_base 8: mod_base = OTHER; note = 2'-fluoroadenosine
  modified_base 9: mod_base = OTHER; note = 2'-fluorouridine
  modified_base 10: mod_base = OTHER; note = 2'-O-methylguanosine
  modified_base 11: mod_base = OTHER; note = 2'-O-methylcytidine
  modified_base 12: mod_base = OTHER; note = 2'-O-methyluridine
  modified_base 13: mod_base = OTHER; note = 2'-O-methylguanosine
  modified_base 14: mod_base = OTHER; note = 2'-O-methyluridine
  modified_base 15: mod_base = OTHER; note = 2'-O-methyluridine
  modified_base 16: mod_base = OTHER; note = 2'-O-methylcytidine
  modified_base 17: mod_base = OTHER; note = 2'-O-methyluridine
  modified_base 18: mod_base = OTHER; note = 2'-O-methyluridine
  modified_base 19: mod_base = OTHER; note = 2'-O-methyladenosine
ctgaagaatgctgttctta

SEQ ID NO: 884 - RNA, 19 nt, synthetic construct
  source 1..19: mol_type = other RNA
  modified_base 1: mod_base = OTHER; note = 2'-O-methylcytidine with phosphorothioate linkage
  modified_base 2: mod_base = OTHER; note = 2'-O-methylcytidine with phosphorothioate linkage
  modified_base 3: mod_base = OTHER; note = 2'-O-methyluridine
  modified_base 4: mod_base = OTHER; note = 2'-O-methylguanosine
  modified_base 5: mod_base = OTHER; note = 2'-fluoroadenosine
  modified_base 6: mod_base = OTHER; note = 2'-O-methyladenosine
  modified_base 7: mod_base = OTHER; note = 2'-fluoroadenosine
  modified_base 8: mod_base = OTHER; note = 2'-fluoroguanosine
  modified_base 9: mod_base = OTHER; note = 2'-fluoroguanosine
  modified_base 10: mod_base = OTHER; note = 2'-O-methylcytidine
  modified_base 11: mod_base = OTHER; note = 2'-O-methylcytidine
  modified_base 12: mod_base = OTHER; note = 2'-O-methyladenosine
  modified_base 13: mod_base = OTHER; note = 2'-O-methyladenosine
  modified_base 14: mod_base = OTHER; note = 2'-O-methylguanosine
  modified_base 15: mod_base = OTHER; note = 2'-O-methyladenosine
  modified_base 16: mod_base = OTHER; note = 2'-O-methyluridine
  modified_base 17: mod_base = OTHER; note = 2'-O-methylcytidine
  modified_base 18: mod_base = OTHER; note = 2'-O-methyladenosine
  modified_base 19: mod_base = OTHER; note = 2'-O-methyladenosine
cctgaaaggccaagatcaa

SEQ ID NO: 885 - RNA, 19 nt, synthetic construct
  source 1..19: mol_type = other RNA
  modified_base 1: mod_base = OTHER; note = 2'-O-methylguanosine with phosphorothioate linkage
  modified_base 2: mod_base = OTHER; note = 2'-O-methyladenosine with phosphorothioate linkage
  modified_base 3: mod_base = OTHER; note = 2'-O-methylcytidine
  modified_base 4: mod_base = OTHER; note = 2'-O-methyluridine
  modified_base 5: mod_base = OTHER; note = 2'-fluoroguanosine
  modified_base 6: mod_base = OTHER; note = 2'-O-methylcytidine
  modified_base 7: mod_base = OTHER; note = 2'-fluorouridine
  modified_base 8: mod_base = OTHER; note = 2'-fluoroguanosine
  modified_base 9: mod_base = OTHER; note = 2'-fluorocytidine
  modified_base 10: mod_base = OTHER; note = 2'-O-methyluridine
  modified_base 11: mod_base = OTHER; note = 2'-O-methyladenosine
  modified_base 12: mod_base = OTHER; note = 2'-O-methylcytidine
  modified_base 13: mod_base = OTHER; note = 2'-O-methyladenosine
  modified_base 14: mod_base = OTHER; note = 2'-O-methyluridine
  modified_base 15: mod_base = OTHER; note = 2'-O-methylcytidine
  modified_base 16: mod_base = OTHER; note = 2'-O-methyluridine
  modified_base 17: mod_base = OTHER; note = 2'-O-methyladenosine
  modified_base 18: mod_base = OTHER; note = 2'-O-methyladenosine
  modified_base 19: mod_base = OTHER; note = 2'-O-methyladenosine
gactgctgctacatctaaa

SEQ ID NO: 886 - RNA, 19 nt, synthetic construct
  source 1..19: mol_type = other RNA
  modified_base 1: mod_base = OTHER; note = 2'-O-methyladenosine with phosphorothioate linkage
  modified_base 2: mod_base = OTHER; note = 2'-O-methylguanosine with phosphorothioate linkage
  modified_base 3: mod_base = OTHER; note = 2'-O-methylguanosine
  modified_base 4: mod_base = OTHER; note = 2'-O-methyluridine
  modified_base 5: mod_base = OTHER; note = 2'-fluorocytidine
  modified_base 6: mod_base = OTHER; note = 2'-O-methyladenosine
  modified_base 7: mod_base = OTHER; note = 2'-fluoroguanosine
  modified_base 8: mod_base = OTHER; note = 2'-fluorouridine
  modified_base 9: mod_base = OTHER; note = 2'-fluoroadenosine
  modified_base 10: mod_base = OTHER; note = 2'-O-methyluridine
  modified_base 11: mod_base = OTHER; note = 2'-O-methylcytidine
  modified_base 12: mod_base = OTHER; note = 2'-O-methyluridine
  modified_base 13: mod_base = OTHER; note = 2'-O-methyladenosine
  modified_base 14: mod_base = OTHER; note = 2'-O-methyladenosine
  modified_base 15: mod_base = OTHER; note = 2'-O-methyluridine
  modified_base 16: mod_base = OTHER; note = 2'-O-methyladenosine
  modified_base 17: mod_base = OTHER; note = 2'-O-methyluridine
  modified_base 18: mod_base = OTHER; note = 2'-O-methyladenosine
  modified_base 19: mod_base = OTHER; note = 2'-O-methyladenosine
aggtcagtatctaatataa

SEQ ID NO: 887 - RNA, 19 nt, synthetic construct
  source 1..19: mol_type = other RNA
  modified_base 1: mod_base = OTHER; note = 2'-O-methylguanosine with phosphorothioate linkage
  modified_base 2: mod_base = OTHER; note = 2'-O-methylguanosine with phosphorothioate linkage
  modified_base 3: mod_base = OTHER; note = 2'-O-methyladenosine
  modified_base 4: mod_base = OTHER; note = 2'-O-methyladenosine
  modified_base 5: mod_base = OTHER; note = 2'-fluorouridine
  modified_base 6: mod_base = OTHER; note = 2'-O-methyluridine
  modified_base 7: mod_base = OTHER; note = 2'-fluorouridine
  modified_base 8: mod_base = OTHER; note = 2'-fluorocytidine
  modified_base 9: mod_base = OTHER; note = 2'-fluorocytidine
  modified_base 10: mod_base = OTHER; note = 2'-O-methyluridine
  modified_base 11: mod_base = OTHER; note = 2'-O-methylcytidine
  modified_base 12: mod_base = OTHER; note = 2'-O-methylcytidine
  modified_base 13: mod_base = OTHER; note = 2'-O-methyladenosine
  modified_base 14: mod_base = OTHER; note = 2'-O-methylcytidine
  modified_base 15: mod_base = OTHER; note = 2'-O-methylcytidine
  modified_base 16: mod_base = OTHER; note = 2'-O-methylcytidine
  modified_base 17: mod_base = OTHER; note = 2'-O-methyluridine
  modified_base 18: mod_base = OTHER; note = 2'-O-methyluridine
  modified_base 19: mod_base = OTHER; note = 2'-O-methyladenosine
ggaatttcctccaccctta

SEQ ID NO: 888 - RNA, 19 nt, synthetic construct
  source 1..19: mol_type = other RNA
  modified_base 1: mod_base = OTHER; note = 2'-O-methylguanosine with phosphorothioate linkage
  modified_base 2: mod_base = OTHER; note = 2'-O-methyladenosine with phosphorothioate linkage
  modified_base 3: mod_base = OTHER; note = 2'-O-methyluridine
  modified_base 4: mod_base = OTHER; note = 2'-O-methyluridine
  modified_base 5: mod_base = OTHER; note = 2'-fluorocytidine
  modified_base 6: mod_base = OTHER; note = 2'-O-methyladenosine
  modified_base 7: mod_base = OTHER; note = 2'-fluorocytidine
  modified_base 8: mod_base = OTHER; note = 2'-fluorocytidine
  modified_base 9: mod_base = OTHER; note = 2'-fluorouridine
  modified_base 10: mod_base = OTHER; note = 2'-O-methyluridine
  modified_base 11: mod_base = OTHER; note = 2'-O-methyluridine
  modified_base 12: mod_base = OTHER; note = 2'-O-methylguanosine
  modified_base 13: mod_base = OTHER; note = 2'-O-methyladenosine
  modified_base 14: mod_base = OTHER; note = 2'-O-methylcytidine
  modified_base 15: mod_base = OTHER; note = 2'-O-methylguanosine
  modified_base 16: mod_base = OTHER; note = 2'-O-methyluridine
  modified_base 17: mod_base = OTHER; note = 2'-O-methylguanosine
  modified_base 18: mod_base = OTHER; note = 2'-O-methyluridine
  modified_base 19: mod_base = OTHER; note = 2'-O-methyladenosine
gattcacctttgacgtgta

SEQ ID NO: 889 - RNA, 19 nt, synthetic construct
  source 1..19: mol_type = other RNA
  modified_base 1: mod_base = OTHER; note = 2'-O-methylguanosine with phosphorothioate linkage
  modified_base 2: mod_base = OTHER; note = 2'-O-methyladenosine with phosphorothioate linkage
  modified_base 3: mod_base = OTHER; note = 2'-O-methylguanosine
  modified_base 4: mod_base = OTHER; note = 2'-O-methylguanosine
  modified_base 5: mod_base = OTHER; note = 2'-fluoroadenosine
  modified_base 6: mod_base = OTHER; note = 2'-O-methyluridine
  modified_base 7: mod_base = OTHER; note = 2'-fluoroguanosine
  modified_base 8: mod_base = OTHER; note = 2'-fluoroadenosine
  modified_base 9: mod_base = OTHER; note = 2'-fluorocytidine
  modified_base 10: mod_base = OTHER; note = 2'-O-methyladenosine
  modified_base 11: mod_base = OTHER; note = 2'-O-methylcytidine
  modified_base 12: mod_base = OTHER; note = 2'-O-methylguanosine
  modified_base 13: mod_base = OTHER; note = 2'-O-methyluridine
  modified_base 14: mod_base = OTHER; note = 2'-O-methylguanosine
  modified_base 15: mod_base = OTHER; note = 2'-O-methylcytidine
  modified_base 16: mod_base = OTHER; note = 2'-O-methylcytidine
  modified_base 17: mod_base = OTHER; note = 2'-O-methyluridine
  modified_base 18: mod_base = OTHER; note = 2'-O-methylguanosine
  modified_base 19: mod_base = OTHER; note = 2'-O-methyladenosine
gaggatgacacgtgcctga

SEQ ID NO: 890 - RNA, 19 nt, synthetic construct
  source 1..19: mol_type = other RNA
  modified_base 1: mod_base = OTHER; note = 2'-O-methylcytidine with phosphorothioate linkage
  modified_base 2: mod_base = OTHER; note = 2'-O-methyluridine with phosphorothioate linkage
  modified_base 3: mod_base = OTHER; note = 2'-O-methylcytidine
  modified_base 4: mod_base = OTHER; note = 2'-O-methyluridine
  modified_base 5: mod_base = OTHER; note = 2'-fluoroadenosine
  modified_base 6: mod_base = OTHER; note = 2'-O-methyluridine
  modified_base 7: mod_base = OTHER; note = 2'-fluoroguanosine
  modified_base 8: mod_base = OTHER; note = 2'-fluoroadenosine
  modified_base 9: mod_base = OTHER; note = 2'-fluoroguanosine
  modified_base 10: mod_base = OTHER; note = 2'-O-methyluridine
  modified_base 11: mod_base = OTHER; note = 2'-O-methyluridine
  modified_base 12: mod_base = OTHER; note = 2'-O-methylguanosine
  modified_base 13: mod_base = OTHER; note = 2'-O-methyluridine
  modified_base 14: mod_base = OTHER; note = 2'-O-methylguanosine
  modified_base 15: mod_base = OTHER; note = 2'-O-methyladenosine
  modified_base 16: mod_base = OTHER; note = 2'-O-methylcytidine
  modified_base 17: mod_base = OTHER; note = 2'-O-methyluridine
  modified_base 18: mod_base = OTHER; note = 2'-O-methyluridine
  modified_base 19: mod_base = OTHER; note = 2'-O-methyladenosine
ctctatgagttgtgactta

SEQ ID NO: 891 - RNA, 19 nt, synthetic construct
  source 1..19: mol_type = other RNA
  modified_base 1: mod_base = OTHER; note = 2'-O-methyladenosine with phosphorothioate linkage
  modified_base 2: mod_base = OTHER; note = 2'-O-methylguanosine with phosphorothioate linkage
  modified_base 3: mod_base = OTHER; note = 2'-O-methyladenosine
  modified_base 4: mod_base = OTHER; note = 2'-O-methylguanosine
  modified_base 5: mod_base = OTHER; note = 2'-fluoroguanosine
  modified_base 6: mod_base = OTHER; note = 2'-O-methyladenosine
  modified_base 7: mod_base = OTHER; note = 2'-fluoroguanosine
  modified_base 8: mod_base = OTHER; note = 2'-fluoroguanosine
  modified_base 9: mod_base = OTHER; note = 2'-fluoroadenosine
  modified_base 10: mod_base = OTHER; note = 2'-O-methyluridine
  modified_base 11: mod_base = OTHER; note = 2'-O-methylguanosine
  modified_base 12: mod_base = OTHER; note = 2'-O-methylguanosine
  modified_base 13: mod_base = OTHER; note = 2'-O-methyladenosine
  modified_base 14: mod_base = OTHER; note = 2'-O-methyladenosine
  modified_base 15: mod_base = OTHER; note = 2'-O-methylcytidine
  modified_base 16: mod_base = OTHER; note = 2'-O-methyluridine
  modified_base 17: mod_base = OTHER; note = 2'-O-methylguanosine
  modified_base 18: mod_base = OTHER; note = 2'-O-methylcytidine
  modified_base 19: mod_base = OTHER; note = 2'-O-methyladenosine
agaggaggatggaactgca

SEQ ID NO: 892 - RNA, 19 nt, synthetic construct
  source 1..19: mol_type = other RNA
  modified_base 1: mod_base = OTHER; note = 2'-O-methyluridine with phosphorothioate linkage
  modified_base 2: mod_base = OTHER; note = 2'-O-methylcytidine with phosphorothioate linkage
  modified_base 3: mod_base = OTHER; note = 2'-O-methyladenosine
  modified_base 4: mod_base = OTHER; note = 2'-O-methylguanosine
  modified_base 5: mod_base = OTHER; note = 2'-fluoroguanosine
  modified_base 6: mod_base = OTHER; note = 2'-O-methyluridine
  modified_base 7: mod_base = OTHER; note = 2'-fluorocytidine
  modified_base 8: mod_base = OTHER; note = 2'-fluoroadenosine
  modified_base 9: mod_base = OTHER; note = 2'-fluoroguanosine
  modified_base 10: mod_base = OTHER; note = 2'-O-methyluridine
  modified_base 11: mod_base = OTHER; note = 2'-O-methyladenosine
  modified_base 12: mod_base = OTHER; note = 2'-O-methyluridine
  modified_base 13: mod_base = OTHER; note = 2'-O-methylcytidine
  modified_base 14: mod_base = OTHER; note = 2'-O-methyluridine
  modified_base 15: mod_base = OTHER; note = 2'-O-methyladenosine
  modified_base 16: mod_base = OTHER; note = 2'-O-methyladenosine
  modified_base 17: mod_base = OTHER; note = 2'-O-methyluridine
  modified_base 18: mod_base = OTHER; note = 2'-O-methyladenosine
  modified_base 19: mod_base = OTHER; note = 2'-O-methyladenosine
tcaggtcagtatctaataa

SEQ ID NO: 893 - RNA, 23 nt, synthetic construct
  source 1..23: mol_type = other RNA
  modified_base 1: mod_base = OTHER; note = 5'-vinyl-phosphonate-2'-O-methyluridine with phosphorothioate linkage
  modified_base 2: mod_base = OTHER; note = 2'-fluoroguanosine with phosphorothioate linkage
  modified_base 3: mod_base = OTHER; note = 2'-O-methylcytidine
  modified_base 4: mod_base = OTHER; note = 2'-O-methyluridine
  modified_base 5: mod_base = OTHER; note = 2'-O-methyluridine
  modified_base 6: mod_base = OTHER; note = 2'-fluoroguanosine
  modified_base 7: mod_base = OTHER; note = 2'-O-methylcytidine
  modified_base 8: mod_base = OTHER; note = 2'-fluorocytidine
  modified_base 9: mod_base = OTHER; note = 2'-fluorouridine
  modified_base 10: mod_base = OTHER; note = 2'-O-methyluridine
  modified_base 11: mod_base = OTHER; note = 2'-O-methylcytidine
  modified_base 12: mod_base = OTHER; note = 2'-O-methylguanosine
  modified_base 13: mod_base = OTHER; note = 2'-O-methylguanosine
  modified_base 14: mod_base = OTHER; note = 2'-fluorocytidine
  modified_base 15: mod_base = OTHER; note = 2'-O-methyluridine
  modified_base 16: mod_base = OTHER; note = 2'-fluorouridine
  modified_base 17: mod_base = OTHER; note = 2'-O-methylguanosine
  modified_base 18: mod_base = OTHER; note = 2'-O-methylcytidine
  modified_base 19: mod_base = OTHER; note = 2'-O-methyluridine
  modified_base 20: mod_base = OTHER; note = 2'-O-methylcytidine
  modified_base 21: mod_base = OTHER; note = 2'-O-methyluridine with phosphorothioate linkage
  modified_base 22: mod_base = OTHER; note = 2'-O-methylguanosine with phosphorothioate linkage
  modified_base 23: mod_base = OTHER; note = 2'-O-methylguanosine
tgcttgccttcggcttgctctgg

SEQ ID NO: 894 - RNA, 23 nt, synthetic construct
  source 1..23: mol_type = other RNA
  modified_base 1: mod_base = OTHER; note = 5'-vinyl-phosphonate-2'-O-methyluridine with phosphorothioate linkage
  modified_base 2: mod_base = OTHER; note = 2'-fluoroadenosine with phosphorothioate linkage
  modified_base 3: mod_base = OTHER; note = 2'-O-methyluridine
  modified_base 4: mod_base = OTHER; note = 2'-O-methylcytidine
  modified_base 5: mod_base = OTHER; note = 2'-O-methylguanosine
  modified_base 6: mod_base = OTHER; note = 2'-fluorouridine
  modified_base 7: mod_base = OTHER; note = 2'-O-methylguanosine
  modified_base 8: mod_base = OTHER; note = 2'-fluorocytidine
  modified_base 9: mod_base = OTHER; note = 2'-fluorouridine
  modified_base 10: mod_base = OTHER; note = 2'-O-methyluridine
  modified_base 11: mod_base = OTHER; note = 2'-O-methylguanosine
  modified_base 12: mod_base = OTHER; note = 2'-O-methylcytidine
  modified_base 13: mod_base = OTHER; note = 2'-O-methylcytidine
  modified_base 14: mod_base = OTHER; note = 2'-fluorouridine
  modified_base 15: mod_base = OTHER; note = 2'-O-methyluridine
  modified_base 16: mod_base = OTHER; note = 2'-fluorocytidine
  modified_base 17: mod_base = OTHER; note = 2'-O-methylguanosine
  modified_base 18: mod_base = OTHER; note = 2'-O-methylguanosine
  modified_base 19: mod_base = OTHER; note = 2'-O-methylcytidine
  modified_base 20: mod_base = OTHER; note = 2'-O-methyluridine
  modified_base 21: mod_base = OTHER; note = 2'-O-methyluridine with phosphorothioate linkage
  modified_base 22: mod_base = OTHER; note = 2'-O-methylguanosine with phosphorothioate linkage
  modified_base 23: mod_base = OTHER; note = 2'-O-methylcytidine
tatcgtgcttgccttcggcttgc

SEQ ID NO: 895 - RNA, 23 nt, synthetic construct
  source 1..23: mol_type = other RNA
  modified_base 1: mod_base = OTHER; note = 5'-vinyl-phosphonate-2'-O-methyluridine with phosphorothioate linkage
  modified_base 2: mod_base = OTHER; note = 2'-fluorocytidine with phosphorothioate linkage
  modified_base 3: mod_base = OTHER; note = 2'-O-methyladenosine
  modified_base 4: mod_base = OTHER; note = 2'-O-methyluridine
  modified_base 5: mod_base = OTHER; note = 2'-O-methylcytidine
  modified_base 6: mod_base = OTHER; note = 2'-fluoroguanosine
  modified_base 7: mod_base = OTHER; note = 2'-O-methyluridine
  modified_base 8: mod_base = OTHER; note = 2'-fluoroguanosine
  modified_base 9: mod_base = OTHER; note = 2'-fluorocytidine
  modified_base 10: mod_base = OTHER; note = 2'-O-methyluridine
  modified_base 11: mod_base = OTHER; note = 2'-O-methyluridine
  modified_base 12: mod_base = OTHER; note = 2'-O-methylguanosine
  modified_base 13: mod_base = OTHER; note = 2'-O-methylcytidine
  modified_base 14: mod_base = OTHER; note = 2'-fluorocytidine
  modified_base 15: mod_base = OTHER; note = 2'-O-methyluridine
  modified_base 16: mod_base = OTHER; note = 2'-fluorouridine
  modified_base 17: mod_base = OTHER; note = 2'-O-methylcytidine
  modified_base 18: mod_base = OTHER; note = 2'-O-methylguanosine
  modified_base 19: mod_base = OTHER; note = 2'-O-methylguanosine
  modified_base 20: mod_base = OTHER; note = 2'-O-methylcytidine
  modified_base 21: mod_base = OTHER; note = 2'-O-methyluridine with phosphorothioate linkage
  modified_base 22: mod_base = OTHER; note = 2'-O-methyluridine with phosphorothioate linkage
  modified_base 23: mod_base = OTHER; note = 2'-O-methylguanosine
tcatcgtgcttgccttcggcttg

SEQ ID NO: 896 - RNA, 23 nt, synthetic construct
  source 1..23: mol_type = other RNA
  modified_base 1: mod_base = OTHER; note = 5'-vinyl-phosphonate-2'-O-methyluridine with phosphorothioate linkage
  modified_base 2: mod_base = OTHER; note = 2'-fluoroguanosine with phosphorothioate linkage
  modified_base 3: mod_base = OTHER; note = 2'-O-methylcytidine
  modified_base 4: mod_base = OTHER; note = 2'-O-methylcytidine
  modified_base 5: mod_base = OTHER; note = 2'-O-methyladenosine
  modified_base 6: mod_base = OTHER; note = 2'-fluorouridine
  modified_base 7: mod_base = OTHER; note = 2'-O-methylcytidine
  modified_base 8: mod_base = OTHER; note = 2'-fluoroguanosine
  modified_base 9: mod_base = OTHER; note = 2'-fluorouridine
  modified_base 10: mod_base = OTHER; note = 2'-O-methylguanosine
  modified_base 11: mod_base = OTHER; note = 2'-O-methylcytidine
  modified_base 12: mod_base = OTHER; note = 2'-O-methyluridine
  modified_base 13: mod_base = OTHER; note = 2'-O-methyluridine
  modified_base 14: mod_base = OTHER; note = 2'-fluoroguanosine
  modified_base 15: mod_base = OTHER; note = 2'-O-methylcytidine
  modified_base 16: mod_base = OTHER; note = 2'-fluorocytidine
  modified_base 17: mod_base = OTHER; note = 2'-O-methyluridine
  modified_base 18: mod_base = OTHER; note = 2'-O-methyluridine
  modified_base 19: mod_base = OTHER; note = 2'-O-methylcytidine
  modified_base 20: mod_base = OTHER; note = 2'-O-methylguanosine
  modified_base 21: mod_base = OTHER; note = 2'-O-methylguanosine with phosphorothioate linkage
  modified_base 22: mod_base = OTHER; note = 2'-O-methylcytidine with phosphorothioate linkage
  modified_base 23: mod_base = OTHER; note = 2'-O-methyluridine
tgccatcgtgcttgccttcggct

SEQ ID NO: 897 - RNA, 23 nt, synthetic construct
  source 1..23: mol_type = other RNA
  modified_base 1: mod_base = OTHER; note = 5'-vinyl-phosphonate-2'-O-methyluridine with phosphorothioate linkage
  modified_base 2: mod_base = OTHER; note = 2'-fluorocytidine with phosphorothioate linkage
  modified_base 3: mod_base = OTHER; note = 2'-O-methylguanosine
  modified_base 4: mod_base = OTHER; note = 2'-O-methylcytidine
  modified_base 5: mod_base = OTHER; note = 2'-O-methylcytidine
  modified_base 6: mod_base = OTHER; note = 2'-fluoroadenosine
  modified_base 7: mod_base = OTHER; note = 2'-O-methyluridine
  modified_base 8: mod_base = OTHER; note = 2'-fluorocytidine
  modified_base 9: mod_base = OTHER; note = 2'-fluoroguanosine
  modified_base 10: mod_base = OTHER; note = 2'-O-methyluridine
  modified_base 11: mod_base = OTHER; note = 2'-O-methylguanosine
  modified_base 12: mod_base = OTHER; note = 2'-O-methylcytidine
  modified_base 13: mod_base = OTHER; note = 2'-O-methyluridine
  modified_base 14: mod_base = OTHER; note = 2'-fluorouridine
  modified_base 15: mod_base = OTHER; note = 2'-O-methylguanosine
  modified_base 16: mod_base = OTHER; note = 2'-fluorocytidine
  modified_base 17: mod_base = OTHER; note = 2'-O-methylcytidine
  modified_base 18: mod_base = OTHER; note = 2'-O-methyluridine
  modified_base 19: mod_base = OTHER; note = 2'-O-methyluridine
  modified_base 20: mod_base = OTHER; note = 2'-O-methylcytidine
  modified_base 21: mod_base = OTHER; note = 2'-O-methylguanosine with phosphorothioate linkage
  modified_base 22: mod_base = OTHER; note = 2'-O-methylguanosine with phosphorothioate linkage
  modified_base 23: mod_base = OTHER; note = 2'-O-methylcytidine
tcgccatcgtgcttgccttcggc

SEQ ID NO: 898 - RNA, 23 nt, synthetic construct
  source 1..23: mol_type = other RNA
  modified_base 1: mod_base = OTHER; note = 5'-vinyl-phosphonate-2'-O-methyluridine with phosphorothioate linkage
  modified_base 2: mod_base = OTHER; note = 2'-fluorouridine with phosphorothioate linkage
  modified_base 3: mod_base = OTHER; note = 2'-O-methylguanosine
  modified_base 4: mod_base = OTHER; note = 2'-O-methyladenosine
  modified_base 5: mod_base = OTHER; note = 2'-O-methylguanosine
  modified_base 6: mod_base = OTHER; note = 2'-fluorocytidine
  modified_base 7: mod_base = OTHER; note = 2'-O-methylguanosine
  modified_base 8: mod_base = OTHER; note = 2'-fluorocytidine
  modified_base 9: mod_base = OTHER; note = 2'-fluorocytidine
  modified_base 10: mod_base = OTHER; note = 2'-O-methyladenosine
  modified_base 11: mod_base = OTHER; note = 2'-O-methyluridine
  modified_base 12: mod_base = OTHER; note = 2'-O-methylcytidine
  modified_base 13: mod_base = OTHER; note = 2'-O-methylguanosine
  modified_base 14: mod_base = OTHER; note = 2'-fluorouridine
  modified_base 15: mod_base = OTHER; note = 2'-O-methylguanosine
  modified_base 16: mod_base = OTHER; note = 2'-fluorocytidine
  modified_base 17: mod_base = OTHER; note = 2'-O-methyluridine
  modified_base 18: mod_base = OTHER; note = 2'-O-methyluridine
  modified_base 19: mod_base = OTHER; note = 2'-O-methylguanosine
  modified_base 20: mod_base = OTHER; note = 2'-O-methylcytidine
  modified_base 21: mod_base = OTHER; note = 2'-O-methylcytidine with phosphorothioate linkage
  modified_base 22: mod_base = OTHER; note = 2'-O-methyluridine with phosphorothioate linkage
  modified_base 23: mod_base = OTHER; note = 2'-O-methyluridine
ttgagcgccatcgtgcttgcctt

SEQ ID NO: 899 - RNA, 23 nt, synthetic construct
  source 1..23: mol_type = other RNA
  modified_base 1: mod_base = OTHER; note = 5'-vinyl-phosphonate-2'-O-methyluridine with phosphorothioate linkage
  modified_base 2: mod_base = OTHER; note = 2'-fluoroguanosine with phosphorothioate linkage
  modified_base 3: mod_base = OTHER; note = 2'-O-methyluridine
  modified_base 4: mod_base = OTHER; note = 2'-O-methylguanosine
  modified_base 5: mod_base = OTHER; note = 2'-O-methyladenosine
  modified_base 6: mod_base = OTHER; note = 2'-fluoroguanosine
  modified_base 7: mod_base = OTHER; note = 2'-O-methylcytidine
  modified_base 8: mod_base = OTHER; note = 2'-fluoroguanosine
  modified_base 9: mod_base = OTHER; note = 2'-fluorocytidine
  modified_base 10: mod_base = OTHER; note = 2'-O-methylcytidine
  modified_base 11: mod_base = OTHER; note = 2'-O-methyladenosine
  modified_base 12: mod_base = OTHER; note = 2'-O-methyluridine
  modified_base 13: mod_base = OTHER; note = 2'-O-methylcytidine
  modified_base 14: mod_base = OTHER; note = 2'-fluoroguanosine
  modified_base 15: mod_base = OTHER; note = 2'-O-methyluridine
  modified_base 16: mod_base = OTHER; note = 2'-fluoroguanosine
  modified_base 17: mod_base = OTHER; note = 2'-O-methylcytidine
  modified_base 18: mod_base = OTHER; note = 2'-O-methyluridine
  modified_base 19: mod_base = OTHER; note = 2'-O-methyluridine
  modified_base 20: mod_base = OTHER; note = 2'-O-methylguanosine
  modified_base 21: mod_base = OTHER; note = 2'-O-methylcytidine with phosphorothioate linkage
  modified_base 22: mod_base = OTHER; note = 2'-O-methylcytidine with phosphorothioate linkage
  modified_base 23: mod_base = OTHER; note = 2'-O-methyluridine
tgtgagcgccatcgtgcttgcct

SEQ ID NO: 900 - RNA, 23 nt, synthetic construct
  source 1..23: mol_type = other RNA
  modified_base 1: mod_base = OTHER; note = 5'-vinyl-phosphonate-2'-O-methyluridine with phosphorothioate linkage
  modified_base 2: mod_base = OTHER; note = 2'-fluoroguanosine with phosphorothioate linkage
  modified_base 3: mod_base = OTHER; note = 2'-O-methylguanosine
  modified_base 4: mod_base = OTHER; note = 2'-O-methyluridine
  modified_base 5: mod_base = OTHER; note = 2'-O-methylguanosine
  modified_base 6: mod_base = OTHER; note = 2'-fluoroadenosine
  modified_base 7: mod_base = OTHER; note = 2'-O-methylguanosine
  modified_base 8: mod_base = OTHER; note = 2'-fluorocytidine
  modified_base 9: mod_base = OTHER; note = 2'-fluoroguanosine
  modified_base 10: mod_base = OTHER; note = 2'-O-methylcytidine
  modified_base 11: mod_base = OTHER; note = 2'-O-methylcytidine
  modified_base 12: mod_base = OTHER; note = 2'-O-methyladenosine
  modified_base 13: mod_base = OTHER; note = 2'-O-methyluridine
  modified_base 14: mod_base = OTHER; note = 2'-fluorocytidine
  modified_base 15: mod_base = OTHER; note = 2'-O-methylguanosine
  modified_base 16: mod_base = OTHER; note = 2'-fluorouridine
  modified_base 17: mod_base = OTHER; note = 2'-O-methylguanosine
  modified_base 18: mod_base = OTHER; note = 2'-O-methylcytidine
  modified_base 19: mod_base = OTHER; note = 2'-O-methyluridine
  modified_base 20: mod_base = OTHER; note = 2'-O-methyluridine
  modified_base 21: mod_base = OTHER; note = 2'-O-methylguanosine with phosphorothioate linkage
  modified_base 22: mod_base = OTHER; note = 2'-O-methylcytidine with phosphorothioate linkage
  modified_base 23: mod_base = OTHER; note = 2'-O-methylcytidine
tggtgagcgccatcgtgcttgcc

SEQ ID NO: 901 - RNA, 23 nt, synthetic construct
  source 1..23: mol_type = other RNA
  modified_base 1: mod_base = OTHER; note = 5'-vinyl-phosphonate-2'-O-methyluridine with phosphorothioate linkage
  modified_base 2: mod_base = OTHER; note = 2'-fluorouridine with phosphorothioate linkage
  modified_base 3: mod_base = OTHER; note = 2'-O-methylguanosine
  modified_base 4: mod_base = OTHER; note = 2'-O-methylguanosine
  modified_base 5: mod_base = OTHER; note = 2'-O-methyluridine
  modified_base 6: mod_base = OTHER; note = 2'-fluoroguanosine
  modified_base 7: mod_base = OTHER; note = 2'-O-methyladenosine
  modified_base 8: mod_base = OTHER; note = 2'-fluoroguanosine
  modified_base 9: mod_base = OTHER; note = 2'-fluorocytidine
  modified_base 10: mod_base = OTHER; note = 2'-O-methylguanosine
  modified_base 11: mod_base = OTHER; note = 2'-O-methylcytidine
  modified_base 12: mod_base = OTHER; note = 2'-O-methylcytidine
  modified_base 13: mod_base = OTHER; note = 2'-O-methyladenosine
  modified_base 14: mod_base = OTHER; note = 2'-fluorouridine
  modified_base 15: mod_base = OTHER; note = 2'-O-methylcytidine
  modified_base 16: mod_base = OTHER; note = 2'-fluoroguanosine
  modified_base 17: mod_base = OTHER; note = 2'-O-methyluridine
  modified_base 18: mod_base = OTHER; note = 2'-O-methylguanosine
  modified_base 19: mod_base = OTHER; note = 2'-O-methylcytidine
  modified_base 20: mod_base = OTHER; note = 2'-O-methyluridine
  modified_base 21: mod_base = OTHER; note = 2'-O-methyluridine with phosphorothioate linkage
  modified_base 22: mod_base = OTHER; note = 2'-O-methylguanosine with phosphorothioate linkage
  modified_base 23: mod_base = OTHER; note = 2'-O-methylcytidine
ttggtgagcgccatcgtgcttgc

SEQ ID NO: 902 - RNA, 23 nt, synthetic construct
  source 1..23: mol_type = other RNA
  modified_base 1: mod_base = OTHER; note = 5'-vinyl-phosphonate-2'-O-methyluridine with phosphorothioate linkage
  modified_base 2: mod_base = OTHER; note = 2'-fluorocytidine with phosphorothioate linkage
  modified_base 3: mod_base = OTHER; note = 2'-O-methylguanosine
  modified_base 4: mod_base = OTHER; note = 2'-O-methylguanosine
  modified_base 5: mod_base = OTHER; note = 2'-O-methylcytidine
  modified_base 6: mod_base = OTHER; note = 2'-fluorouridine
  modified_base 7: mod_base = OTHER; note = 2'-O-methylguanosine
  modified_base 8: mod_base = OTHER; note = 2'-fluoroguanosine
  modified_base 9: mod_base = OTHER; note = 2'-fluorouridine
  modified_base 10: mod_base = OTHER; note = 2'-O-methylguanosine
  modified_base 11: mod_base = OTHER; note = 2'-O-methyladenosine
  modified_base 12: mod_base = OTHER; note = 2'-O-methylguanosine
  modified_base 13: mod_base = OTHER; note = 2'-O-methylcytidine
  modified_base 14: mod_base = OTHER; note = 2'-fluoroguanosine
  modified_base 15: mod_base = OTHER; note = 2'-O-methylcytidine
  modified_base 16: mod_base = OTHER; note = 2'-fluorocytidine
  modified_base 17: mod_base = OTHER; note = 2'-O-methyladenosine
  modified_base 18: mod_base = OTHER; note = 2'-O-methyluridine
  modified_base 19: mod_base = OTHER; note = 2'-O-methylcytidine
  modified_base 20: mod_base = OTHER; note = 2'-O-methylguanosine
  modified_base 21: mod_base = OTHER; note = 2'-O-methyluridine with phosphorothioate linkage
  modified_base 22: mod_base = OTHER; note = 2'-O-methylguanosine with phosphorothioate linkage
  modified_base 23: mod_base = OTHER; note = 2'-O-methylcytidine
tcggctggtgagcgccatcgtgc

SEQ ID NO: 903 - RNA, 23 nt, synthetic construct
  source 1..23: mol_type = other RNA
  modified_base 1: mod_base = OTHER; note = 5'-vinyl-phosphonate-2'-O-methyluridine with phosphorothioate linkage
  modified_base 2: mod_base = OTHER; note = 2'-fluoroadenosine with phosphorothioate linkage
  modified_base 3: mod_base = OTHER; note = 2'-O-methylcytidine
  modified_base 4: mod_base = OTHER; note = 2'-O-methylguanosine
  modified_base 5: mod_base = OTHER; note = 2'-O-methylcytidine
  modified_base 6: mod_base = OTHER; note = 2'-fluorouridine
  modified_base 7: mod_base = OTHER; note = 2'-O-methylguanosine
  modified_base 8: mod_base = OTHER; note = 2'-fluoroguanosine
  modified_base 9: mod_base = OTHER; note = 2'-fluorocytidine
  modified_base 10: mod_base = OTHER; note = 2'-O-methyladenosine
  modified_base 11: mod_base = OTHER; note = 2'-O-methylcytidine
  modified_base 12: mod_base = OTHER; note = 2'-O-methylguanosine
  modified_base 13: mod_base = OTHER; note = 2'-O-methylguanosine
  modified_base 14: mod_base = OTHER; note = 2'-fluorocytidine
  modified_base 15: mod_base = OTHER; note = 2'-O-methyluridine
  modified_base 16: mod_base = OTHER; note = 2'-fluoroguanosine
  modified_base 17: mod_base = OTHER; note = 2'-O-methylcytidine
  modified_base 18: mod_base = OTHER; note = 2'-O-methylguanosine
  modified_base 19: mod_base = OTHER; note = 2'-O-methylguanosine
  modified_base 20: mod_base = OTHER; note = 2'-O-methylguanosine
  modified_base 21: mod_base = OTHER; note = 2'-O-methylguanosine with phosphorothioate linkage
  modified_base 22: mod_base = OTHER; note = 2'-O-methylcytidine with phosphorothioate linkage
  modified_base 23: mod_base = OTHER; note = 2'-O-methylguanosine
tacgctggcacggctgcggggcg

SEQ ID NO: 904 - RNA, 23 nt, synthetic construct
  source 1..23: mol_type = other RNA
  modified_base 1: mod_base = OTHER; note = 5'-vinyl-phosphonate-2'-O-methyluridine with phosphorothioate linkage
  modified_base 2: mod_base = OTHER; note = 2'-fluorocytidine with phosphorothioate linkage
  modified_base 3: mod_base = OTHER; note = 2'-O-methylguanosine
  modified_base 4: mod_base = OTHER; note = 2'-O-methyluridine
  modified_base 5: mod_base = OTHER; note = 2'-O-methylguanosine
  modified_base 6: mod_base = OTHER; note = 2'-fluoroadenosine
  modified_base 7: mod_base = OTHER; note = 2'-O-methylcytidine
  modified_base 8: mod_base = OTHER; note = 2'-fluoroguanosine
  modified_base 9: mod_base = OTHER; note = 2'-fluorocytidine
  modified_base 10: mod_base = OTHER; note = 2'-O-methyluridine
  modified_base 11: mod_base = OTHER; note = 2'-O-methylguanosine
  modified_base 12: mod_base = OTHER; note = 2'-O-methylguanosine
  modified_base 13: mod_base = OTHER; note = 2'-O-methylcytidine
  modified_base 14: mod_base = OTHER; note = 2'-fluoroadenosine
  modified_base 15: mod_base = OTHER; note = 2'-O-methylcytidine
  modified_base 16: mod_base = OTHER; note = 2'-fluoroguanosine
  modified_base 17: mod_base = OTHER; note = 2'-O-methylguanosine
  modified_base 18: mod_base = OTHER; note = 2'-O-methylcytidine
  modified_base 19: mod_base = OTHER; note = 2'-O-methyluridine
  modified_base 20: mod_base = OTHER; note = 2'-O-methylguanosine
  modified_base 21: mod_base = OTHER; note = 2'-O-methylcytidine with phosphorothioate linkage
  modified_base 22: mod_base = OTHER; note = 2'-O-methylguanosine with phosphorothioate linkage
  modified_base 23: mod_base = OTHER; note = 2'-O-methylguanosine
tcgtgacgctggcacggctgcgg

SEQ ID NO: 905 - RNA, 23 nt, synthetic construct
  source 1..23: mol_type = other RNA
  modified_base 1: mod_base = OTHER; note = 5'-vinyl-phosphonate-2'-O-methyluridine with phosphorothioate linkage
  modified_base 2: mod_base = OTHER; note = 2'-fluoroguanosine with phosphorothioate linkage
  modified_base 3: mod_base = OTHER; note = 2'-O-methylcytidine
  modified_base 4: mod_base = OTHER; note = 2'-O-methylguanosine
  modified_base 5: mod_base = OTHER; note = 2'-O-methyluridine
  modified_base 6: mod_base = OTHER; note = 2'-fluoroguanosine
  modified_base 7: mod_base = OTHER; note = 2'-O-methyladenosine
  modified_base 8: mod_base = OTHER; note = 2'-fluorocytidine
  modified_base 9: mod_base = OTHER; note = 2'-fluoroguanosine
  modified_base 10: mod_base = OTHER; note = 2'-O-methylcytidine
  modified_base 11: mod_base = OTHER; note = 2'-O-methyluridine
  modified_base 12: mod_base = OTHER; note = 2'-O-methylguanosine
  modified_base 13: mod_base = OTHER; note = 2'-O-methylguanosine
  modified_base 14: mod_base = OTHER; note = 2'-fluorocytidine
  modified_base 15: mod_base = OTHER; note = 2'-O-methyladenosine
  modified_base 16: mod_base = OTHER; note = 2'-fluorocytidine
  modified_base 17: mod_base = OTHER; note = 2'-O-methylguanosine
  modified_base 18: mod_base = OTHER; note = 2'-O-methylguanosine
  modified_base 19: mod_base = OTHER; note = 2'-O-methylcytidine
  modified_base 20: mod_base = OTHER; note = 2'-O-methyluridine
  modified_base 21: mod_base = OTHER; note = 2'-O-methylguanosine with phosphorothioate linkage
  modified_base 22: mod_base = OTHER; note = 2'-O-methylcytidine with phosphorothioate linkage
  modified_base 23: mod_base = OTHER; note = 2'-O-methylguanosine
tgcgtgacgctggcacggctgcg

SEQ ID NO: 906 - RNA, 23 nt, synthetic construct
  source 1..23: mol_type = other RNA
  modified_base 1: mod_base = OTHER; note = 5'-vinyl-phosphonate-2'-O-methyluridine with phosphorothioate linkage
  modified_base 2: mod_base = OTHER; note = 2'-fluoroadenosine with phosphorothioate linkage
  modified_base 3: mod_base = OTHER; note = 2'-O-methylguanosine
  modified_base 4: mod_base = OTHER; note = 2'-O-methylcytidine
  modified_base 5: mod_base = OTHER; note = 2'-O-methylguanosine
  modified_base 6: mod_base = OTHER; note = 2'-fluorouridine
  modified_base 7: mod_base = OTHER; note = 2'-O-methylguanosine
  modified_base 8: mod_base = OTHER; note = 2'-fluoroadenosine
  modified_base 9: mod_base = OTHER; note = 2'-fluorocytidine
  modified_base 10: mod_base = OTHER; note = 2'-O-methylguanosine
  modified_base 11: mod_base = OTHER; note = 2'-O-methylcytidine
  modified_base 12: mod_base = OTHER; note = 2'-O-methyluridine
  modified_base 13: mod_base = OTHER; note = 2'-O-methylguanosine
  modified_base 14: mod_base = OTHER; note = 2'-fluoroguanosine
  modified_base 15: mod_base = OTHER; note = 2'-O-methylcytidine
  modified_base 16: mod_base = OTHER; note = 2'-fluoroadenosine
  modified_base 17: mod_base = OTHER; note = 2'-O-methylcytidine
  modified_base 18: mod_base = OTHER; note = 2'-O-methylguanosine
  modified_base 19: mod_base = OTHER; note = 2'-O-methylguanosine
  modified_base 20: mod_base = OTHER; note = 2'-O-methylcytidine
  modified_base 21: mod_base = OTHER; note = 2'-O-methyluridine with phosphorothioate linkage
  modified_base 22: mod_base = OTHER; note = 2'-O-methylguanosine with phosphorothioate linkage
  modified_base 23: mod_base = OTHER; note = 2'-O-methylcytidine
tagcgtgacgctggcacggctgc

SEQ ID NO: 907 - RNA, 23 nt, synthetic construct
  source 1..23: mol_type = other RNA
  modified_base 1: mod_base = OTHER; note = 5'-vinyl-phosphonate-2'-O-methyluridine with phosphorothioate linkage
  modified_base 2: mod_base = OTHER; note = 2'-fluorocytidine with phosphorothioate linkage
  modified_base 3: mod_base = OTHER; note = 2'-O-methyladenosine
  modified_base 4: mod_base = OTHER; note = 2'-O-methylguanosine
  modified_base 5: mod_base = OTHER; note = 2'-O-methylcytidine
  modified_base 6: mod_base = OTHER; note = 2'-fluoroguanosine
  modified_base 7: mod_base = OTHER; note = 2'-O-methyluridine
  modified_base 8: mod_base = OTHER; note = 2'-fluoroguanosine
  modified_base 9: mod_base = OTHER; note = 2'-fluoroadenosine
  modified_base 10: mod_base = OTHER; note = 2'-O-methylcytidine
  modified_base 11: mod_base = OTHER; note = 2'-O-methylguanosine
  modified_base 12: mod_base = OTHER; note = 2'-O-methylcytidine
  modified_base 13: mod_base = OTHER; note = 2'-O-methyluridine
  modified_base 14: mod_base = OTHER; note = 2'-fluoroguanosine
  modified_base 15: mod_base = OTHER; note = 2'-O-methylguanosine
  modified_base 16: mod_base = OTHER; note = 2'-fluorocytidine
  modified_base 17: mod_base = OTHER; note = 2'-O-methyladenosine
  modified_base 18: mod_base = OTHER; note = 2'-O-methylcytidine
  modified_base 19: mod_base = OTHER; note = 2'-O-methylguanosine
  modified_base 20: mod_base = OTHER; note = 2'-O-methylguanosine
  modified_base 21: mod_base = OTHER; note = 2'-O-methylcytidine with phosphorothioate linkage
  modified_base 22: mod_base = OTHER; note = 2'-O-methyluridine with phosphorothioate linkage
  modified_base 23: mod_base = OTHER; note = 2'-O-methylguanosine
tcagcgtgacgctggcacggctg

SEQ ID NO: 908 - RNA, 23 nt, synthetic construct
  source 1..23: mol_type = other RNA
  modified_base 1: mod_base = OTHER; note = 5'-vinyl-phosphonate-2'-O-methyluridine with phosphorothioate linkage
  modified_base 2: mod_base = OTHER; note = 2'-fluorouridine with phosphorothioate linkage
  modified_base 3: mod_base = OTHER; note = 2'-O-methyladenosine
  modified_base 4: mod_base = OTHER; note = 2'-O-methylcytidine
  modified_base 5: mod_base = OTHER; note = 2'-O-methyladenosine
  modified_base 6: mod_base = OTHER; note = 2'-fluoroguanosine
  modified_base 7: mod_base = OTHER; note = 2'-O-methylcytidine
  modified_base 8: mod_base = OTHER; note = 2'-fluoroguanosine
  modified_base 9: mod_base = OTHER; note = 2'-fluorouridine
  modified_base 10: mod_base = OTHER; note = 2'-O-methylguanosine
  modified_base 11: mod_base = OTHER; note = 2'-O-methyladenosine
  modified_base 12: mod_base = OTHER; note = 2'-O-methylcytidine
  modified_base 13: mod_base = OTHER; note = 2'-O-methylguanosine
  modified_base 14: mod_base = OTHER; note = 2'-fluorocytidine
  modified_base 15: mod_base = OTHER; note = 2'-O-methyluridine
  modified_base 16: mod_base = OTHER; note = 2'-fluoroguanosine
  modified_base 17: mod_base = OTHER; note = 2'-O-methylguanosine
  modified_base 18: mod_base = OTHER; note = 2'-O-methylcytidine
  modified_base 19: mod_base = OTHER; note = 2'-O-methyladenosine
  modified_base 20: mod_base = OTHER; note = 2'-O-methylcytidine
  modified_base 21: mod_base = OTHER; note = 2'-O-methylguanosine with phosphorothioate linkage
  modified_base 22: mod_base = OTHER; note = 2'-O-methylguanosine with phosphorothioate linkage
  modified_base 23: mod_base = OTHER; note = 2'-O-methylcytidine
ttacagcgtgacgctggcacggc

SEQ ID NO: 909 - RNA, 23 nt, synthetic construct
  source 1..23: mol_type = other RNA
  modified_base 1: mod_base = OTHER; note = 5'-vinyl-phosphonate-2'-O-methyluridine with phosphorothioate linkage
  modified_base 2: mod_base = OTHER; note = 2'-fluorouridine with phosphorothioate linkage
  modified_base 3: mod_base = OTHER; note = 2'-O-methylguanosine
  modified_base 4: mod_base = OTHER; note = 2'-O-methylcytidine
  modified_base 5: mod_base = OTHER; note = 2'-O-methyluridine
  modified_base 6: mod_base = OTHER; note = 2'-fluoroadenosine
  modified_base 7: mod_base = OTHER; note = 2'-O-methylcytidine
  modified_base 8: mod_base = OTHER; note = 2'-fluoroadenosine
  modified_base 9: mod_base = OTHER; note = 2'-fluoroguanosine
  modified_base 10: mod_base = OTHER; note = 2'-O-methylcytidine
  modified_base 11: mod_base = OTHER; note = 2'-O-methylguanosine
  modified_base 12: mod_base = OTHER; note = 2'-O-methyluridine
  modified_base 13: mod_base = OTHER; note = 2'-O-methylguanosine
  modified_base 14: mod_base = OTHER; note = 2'-fluoroadenosine
  modified_base 15: mod_base = OTHER; note = 2'-O-methylcytidine
  modified_base 16: mod_base = OTHER; note = 2'-fluoroguanosine
  modified_base 17: mod_base = OTHER; note = 2'-O-methylcytidine
  modified_base 18: mod_base = OTHER; note = 2'-O-methyluridine
  modified_base 19: mod_base = OTHER; note = 2'-O-methylguanosine
  modified_base 20: mod_base = OTHER; note = 2'-O-methylguanosine
  modified_base 21: mod_base = OTHER; note = 2'-O-methylcytidine with phosphorothioate linkage
  modified_base 22: mod_base = OTHER; note = 2'-O-methyladenosine with phosphorothioate linkage
  modified_base 23: mod_base = OTHER; note = 2'-O-methylcytidine
ttgctacagcgtgacgctggcac

SEQ ID NO: 910 - RNA, 23 nt, synthetic construct
  source 1..23: mol_type = other RNA
  modified_base 1: mod_base = OTHER; note = 5'-vinyl-phosphonate-2'-O-methyluridine with phosphorothioate linkage
  modified_base 2: mod_base = OTHER; note = 2'-fluorocytidine with phosphorothioate linkage
  modified_base 3: mod_base = OTHER; note = 2'-O-methyluridine
  modified_base 4: mod_base = OTHER; note = 2'-O-methylguanosine
  modified_base 5: mod_base = OTHER; note = 2'-O-methylcytidine
  modified_base 6: mod_base = OTHER; note = 2'-fluorouridine
  modified_base 7: mod_base = OTHER; note = 2'-O-methyladenosine
  modified_base 8: mod_base = OTHER; note = 2'-fluorocytidine
  modified_base 9: mod_base = OTHER; note = 2'-fluoroadenosine
  modified_base 10: mod_base = OTHER; note = 2'-O-methylguanosine
  modified_base 11: mod_base = OTHER; note = 2'-O-methylcytidine
  modified_base 12: mod_base = OTHER; note = 2'-O-methylguanosine
  modified_base 13: mod_base = OTHER; note = 2'-O-methyluridine
  modified_base 14: mod_base = OTHER; note = 2'-fluoroguanosine
  modified_base 15: mod_base = OTHER; note = 2'-O-methyladenosine
  modified_base 16: mod_base = OTHER; note = 2'-fluorocytidine
  modified_base 17: mod_base = OTHER; note = 2'-O-methylguanosine
  modified_base 18: mod_base = OTHER; note = 2'-O-methylcytidine
  modified_base 19: mod_base = OTHER; note = 2'-O-methyluridine
  modified_base 20: mod_base = OTHER; note = 2'-O-methylguanosine
  modified_base 21: mod_base = OTHER; note = 2'-O-methylguanosine with phosphorothioate linkage
  modified_base 22: mod_base = OTHER; note = 2'-O-methylcytidine with phosphorothioate linkage
  modified_base 23: mod_base = OTHER; note = 2'-O-methyladenosine
tctgctacagcgtgacgctggca

SEQ ID NO: 911 - RNA, 23 nt, synthetic construct
  source 1..23: mol_type = other RNA
  modified_base 1: mod_base = OTHER; note = 5'-vinyl-phosphonate-2'-O-methyluridine with phosphorothioate linkage
  modified_base 2: mod_base = OTHER; note = 2'-fluoroguanosine with phosphorothioate linkage
  modified_base 3: mod_base = OTHER; note = 2'-O-methylcytidine
  modified_base 4: mod_base = OTHER; note = 2'-O-methyluridine
  modified_base 5: mod_base = OTHER; note = 2'-O-methylguanosine
  modified_base 6: mod_base = OTHER; note = 2'-fluorocytidine
  modified_base 7: mod_base = OTHER; note = 2'-O-methyluridine
  modified_base 8: mod_base = OTHER; note = 2'-fluoroadenosine
  modified_base 9: mod_base = OTHER; note = 2'-fluorocytidine
  modified_base 10: mod_base = OTHER; note = 2'-O-methyladenosine
  modified_base 11: mod_base = OTHER; note = 2'-O-methylguanosine
  modified_base 12: mod_base = OTHER; note = 2'-O-methylcytidine
  modified_base 13: mod_base = OTHER; note = 2'-O-methylguanosine
  modified_base 14: mod_base = OTHER; note = 2'-fluorouridine
  modified_base 15: mod_base = OTHER; note = 2'-O-methylguanosine
  modified_base 16: mod_base = OTHER; note = 2'-fluoroadenosine
  modified_base 17: mod_base = OTHER; note = 2'-O-methylcytidine
  modified_base 18: mod_base = OTHER; note = 2'-O-methylguanosine
  modified_base 19: mod_base = OTHER; note = 2'-O-methylcytidine
  modified_base 20: mod_base = OTHER; note = 2'-O-methyluridine
  modified_base 21: mod_base = OTHER; note = 2'-O-methylguanosine with phosphorothioate linkage
  modified_base 22: mod_base = OTHER; note = 2'-O-methylguanosine with phosphorothioate linkage
  modified_base 23: mod_base = OTHER; note = 2'-O-methylcytidine
tgctgctacagcgtgacgctggc

SEQ ID NO: 912 - RNA, 23 nt, synthetic construct
  source 1..23: mol_type = other RNA
  modified_base 1: mod_base = OTHER; note = 5'-vinyl-phosphonate-2'-O-methyluridine with phosphorothioate linkage
  modified_base 2: mod_base = OTHER; note = 2'-fluorocytidine with phosphorothioate linkage
  modified_base 3: mod_base = OTHER; note = 2'-O-methylguanosine
  modified_base 4: mod_base = OTHER; note = 2'-O-methylguanosine
  modified_base 5: mod_base = OTHER; note = 2'-O-methylcytidine
  modified_base 6: mod_base = OTHER; note = 2'-fluorouridine
  modified_base 7: mod_base = OTHER; note = 2'-O-methylguanosine
  modified_base 8: mod_base = OTHER; note = 2'-fluorocytidine
  modified_base 9: mod_base = OTHER; note = 2'-fluorouridine
  modified_base 10: mod_base = OTHER; note = 2'-O-methyladenosine
  modified_base 11: mod_base = OTHER; note = 2'-O-methylcytidine
  modified_base 12: mod_base = OTHER; note = 2'-O-methyladenosine
  modified_base 13: mod_base = OTHER; note = 2'-O-methylguanosine
  modified_base 14: mod_base = OTHER; note = 2'-fluorocytidine
  modified_base 15: mod_base = OTHER; note = 2'-O-methylguanosine
  modified_base 16: mod_base = OTHER; note = 2'-fluorouridine
  modified_base 17: mod_base = OTHER; note = 2'-O-methylguanosine
  modified_base 18: mod_base = OTHER; note = 2'-O-methyladenosine
  modified_base 19: mod_base = OTHER; note = 2'-O-methylcytidine
  modified_base 20: mod_base = OTHER; note = 2'-O-methylguanosine
  modified_base 21: mod_base = OTHER; note = 2'-O-methylcytidine with phosphorothioate linkage
  modified_base 22: mod_base = OTHER; note = 2'-O-methyluridine with phosphorothioate linkage
  modified_base 23: mod_base = OTHER; note = 2'-O-methylguanosine
tcggctgctacagcgtgacgctg

SEQ ID NO: 913 - RNA, 23 nt, synthetic construct
  source 1..23: mol_type = other RNA
  modified_base 1: mod_base = OTHER; note = 5'-vinyl-phosphonate-2'-O-methyluridine with phosphorothioate linkage
  modified_base 2: mod_base = OTHER; note = 2'-fluorouridine with phosphorothioate linkage
  modified_base 3: mod_base = OTHER; note = 2'-O-methylcytidine
  modified_base 4: mod_base = OTHER; note = 2'-O-methylguanosine
  modified_base 5: mod_base = OTHER; note = 2'-O-methylguanosine
  modified_base 6: mod_base = OTHER; note = 2'-fluorocytidine
  modified_base 7: mod_base = OTHER; note = 2'-O-methyluridine
  modified_base 8: mod_base = OTHER; note = 2'-fluoroguanosine
  modified_base 9: mod_base = OTHER; note = 2'-fluorocytidine
  modified_base 10: mod_base = OTHER; note = 2'-O-methyluridine
  modified_base 11: mod_base = OTHER; note = 2'-O-methyladenosine
  modified_base 12: mod_base = OTHER; note = 2'-O-methylcytidine
  modified_base 13: mod_base = OTHER; note = 2'-O-methyladenosine
  modified_base 14: mod_base = OTHER; note = 2'-fluoroguanosine
  modified_base 15: mod_base = OTHER; note = 2'-O-methylcytidine
  modified_base 16: mod_base = OTHER; note = 2'-fluoroguanosine
  modified_base 17: mod_base = OTHER; note = 2'-O-methyluridine
  modified_base 18: mod_base = OTHER; note = 2'-O-methylguanosine
  modified_base 19: mod_base = OTHER; note = 2'-O-methyladenosine
  modified_base 20: mod_base = OTHER; note = 2'-O-methylcytidine
  modified_base 21: mod_base = OTHER; note = 2'-O-methylguanosine with phosphorothioate linkage
  modified_base 22: mod_base = OTHER; note = 2'-O-methylcytidine with phosphorothioate linkage
  modified_base 23: mod_base = OTHER; note = 2'-O-methyluridine
ttcggctgctacagcgtgacgct

SEQ ID NO: 914 - RNA, 23 nt, synthetic construct
  source 1..23: mol_type = other RNA
  modified_base 1: mod_base = OTHER; note = 5'-vinyl-phosphonate-2'-O-methyluridine with phosphorothioate linkage
  modified_base 2: mod_base = OTHER; note = 2'-fluorocytidine with phosphorothioate linkage
  modified_base 3: mod_base = OTHER; note = 2'-O-methyluridine
  modified_base 4: mod_base = OTHER; note = 2'-O-methylcytidine
  modified_base 5: mod_base = OTHER; note = 2'-O-methylguanosine
  modified_base 6: mod_base = OTHER; note = 2'-fluoroguanosine
  modified_base 7: mod_base = OTHER; note = 2'-O-methylcytidine
  modified_base 8: mod_base = OTHER; note = 2'-fluorouridine
  modified_base 9: mod_base = OTHER; note = 2'-fluoroguanosine
  modified_base 10: mod_base = OTHER; note = 2'-O-methylcytidine
  modified_base 11: mod_base = OTHER; note = 2'-O-methyluridine
  modified_base 12: mod_base = OTHER; note = 2'-O-methyladenosine
  modified_base 13: mod_base = OTHER; note = 2'-O-methylcytidine
  modified_base 14: mod_base = OTHER; note = 2'-fluoroadenosine
  modified_base 15: mod_base = OTHER; note = 2'-O-methylguanosine
  modified_base 16: mod_base = OTHER; note = 2'-fluorocytidine
  modified_base 17: mod_base = OTHER; note = 2'-O-methylguanosine
  modified_base 18: mod_base = OTHER; note = 2'-O-methyluridine
  modified_base 19: mod_base = OTHER; note = 2'-O-methylguanosine
  modified_base 20: mod_base = OTHER; note = 2'-O-methyladenosine
  modified_base 21: mod_base = OTHER; note = 2'-O-methylcytidine with phosphorothioate linkage
  modified_base 22: mod_base = OTHER; note = 2'-O-methylguanosine with phosphorothioate linkage
  modified_base 23: mod_base = OTHER; note = 2'-O-methylcytidine
tctcggctgctacagcgtgacgc

SEQ ID NO: 915 - RNA, 23 nt, synthetic construct
  source 1..23: mol_type = other RNA
  modified_base 1: mod_base = OTHER; note = 5'-vinyl-phosphonate-2'-O-methyluridine with phosphorothioate linkage
  modified_base 2: mod_base = OTHER; note = 2'-fluorouridine with phosphorothioate linkage
  modified_base 3: mod_base = OTHER; note = 2'-O-methylguanosine
  modified_base 4: mod_base = OTHER; note = 2'-O-methylcytidine
  modified_base 5: mod_base = OTHER; note = 2'-O-methyluridine
  modified_base 6: mod_base = OTHER; note = 2'-fluorocytidine
  modified_base 7: mod_base = OTHER; note = 2'-O-methylguanosine
  modified_base 8: mod_base = OTHER; note = 2'-fluoroguanosine
  modified_base 9: mod_base = OTHER; note = 2'-fluorocytidine
  modified_base 10: mod_base = OTHER; note = 2'-O-methyluridine
  modified_base 11: mod_base = OTHER; note = 2'-O-methylguanosine
  modified_base 12: mod_base = OTHER; note = 2'-O-methylcytidine
  modified_base 13: mod_base = OTHER; note = 2'-O-methyluridine
  modified_base 14: mod_base = OTHER; note = 2'-fluoroadenosine
  modified_base 15: mod_base = OTHER; note = 2'-O-methylcytidine
  modified_base 16: mod_base = OTHER; note = 2'-fluoroadenosine
  modified_base 17: mod_base = OTHER; note = 2'-O-methylguanosine
  modified_base 18: mod_base = OTHER; note = 2'-O-methylcytidine
  modified_base 19: mod_base = OTHER; note = 2'-O-methylguanosine
  modified_base 20: mod_base = OTHER; note = 2'-O-methyluridine
  modified_base 21: mod_base = OTHER; note = 2'-O-methylguanosine with phosphorothioate linkage
  modified_base 22: mod_base = OTHER; note = 2'-O-methyladenosine with phosphorothioate linkage
  modified_base 23: mod_base = OTHER; note = 2'-O-methylcytidine
ttgctcggctgctacagcgtgac

SEQ ID NO: 916 - RNA, 23 nt, synthetic construct
  source 1..23: mol_type = other RNA
  modified_base 1: mod_base = OTHER; note = 5'-vinyl-phosphonate-2'-O-methyluridine with phosphorothioate linkage
  modified_base 2: mod_base = OTHER; note = 2'-fluoroadenosine with phosphorothioate linkage
  modified_base 3: mod_base = OTHER; note = 2'-O-methyluridine
  modified_base 4: mod_base = OTHER; note = 2'-O-methylguanosine
  modified_base 5: mod_base = OTHER; note = 2'-O-methylcytidine
  modified_base 6: mod_base = OTHER; note = 2'-fluorouridine
  modified_base 7: mod_base = OTHER; note = 2'-O-methylcytidine
  modified_base 8: mod_base = OTHER; note = 2'-fluoroguanosine
  modified_base 9: mod_base = OTHER; note = 2'-fluoroguanosine
  modified_base 10: mod_base = OTHER; note = 2'-O-methylcytidine
  modified_base 11: mod_base = OTHER; note = 2'-O-methyluridine
  modified_base 12: mod_base = OTHER; note = 2'-O-methylguanosine
  modified_base 13: mod_base = OTHER; note = 2'-O-methylcytidine
  modified_base 14: mod_base = OTHER; note = 2'-fluorouridine
  modified_base 15: mod_base = OTHER; note = 2'-O-methyladenosine
  modified_base 16: mod_base = OTHER; note = 2'-fluorocytidine
  modified_base 17: mod_base = OTHER; note = 2'-O-methyladenosine
  modified_base 18: mod_base = OTHER; note = 2'-O-methylguanosine
  modified_base 19: mod_base = OTHER; note = 2'-O-methylcytidine
  modified_base 20: mod_base = OTHER; note = 2'-O-methylguanosine
  modified_base 21: mod_base = OTHER; note = 2'-O-methyluridine with phosphorothioate linkage
  modified_base 22: mod_base = OTHER; note = 2'-O-methylguanosine with phosphorothioate linkage
  modified_base 23: mod_base = OTHER; note = 2'-O-methyladenosine
tatgctcggctgctacagcgtga

SEQ ID NO: 917 - RNA, 23 nt, synthetic construct
  source 1..23: mol_type = other RNA
  modified_base 1: mod_base = OTHER; note = 5'-vinyl-phosphonate-2'-O-methyluridine with phosphorothioate linkage
  modified_base 2: mod_base = OTHER; note = 2'-fluorouridine with phosphorothioate linkage
  modified_base 3: mod_base = OTHER; note = 2'-O-methylguanosine
  modified_base 4: mod_base = OTHER; note = 2'-O-methyladenosine
  modified_base 5: mod_base = OTHER; note = 2'-O-methyluridine
  modified_base 6: mod_base = OTHER; note = 2'-fluoroguanosine
  modified_base 7: mod_base = OTHER; note = 2'-O-methylcytidine
  modified_base 8: mod_base = OTHER; note = 2'-fluorouridine
  modified_base 9: mod_base = OTHER; note = 2'-fluorocytidine
  modified_base 10: mod_base = OTHER; note = 2'-O-methylguanosine
  modified_base 11: mod_base = OTHER; note = 2'-O-methylguanosine
  modified_base 12: mod_base = OTHER; note = 2'-O-methylcytidine
  modified_base 13: mod_base = OTHER; note = 2'-O-methyluridine
  modified_base 14: mod_base = OTHER; note = 2'-fluoroguanosine
  modified_base 15: mod_base = OTHER; note = 2'-O-methylcytidine
  modified_base 16: mod_base = OTHER; note = 2'-fluorouridine
  modified_base 17: mod_base = OTHER; note = 2'-O-methyladenosine
  modified_base 18: mod_base = OTHER; note = 2'-O-methylcytidine
  modified_base 19: mod_base = OTHER; note = 2'-O-methyladenosine
  modified_base 20: mod_base = OTHER; note = 2'-O-methylguanosine
  modified_base 21: mod_base = OTHER; note = 2'-O-methylcytidine with phosphorothioate linkage
  modified_base 22: mod_base = OTHER; note = 2'-O-methylguanosine with phosphorothioate linkage
  modified_base 23: mod_base = OTHER; note = 2'-O-methyluridine
ttgatgctcggctgctacagcgt

SEQ ID NO: 918 - RNA, 23 nt, synthetic construct
  source 1..23: mol_type = other RNA
  modified_base 1: mod_base = OTHER; note = 5'-vinyl-phosphonate-2'-O-methyluridine with phosphorothioate linkage
  modified_base 2: mod_base = OTHER; note = 2'-fluorouridine with phosphorothioate linkage
  modified_base 3: mod_base = OTHER; note = 2'-O-methyluridine
  modified_base 4: mod_base = OTHER; note = 2'-O-methyluridine
  modified_base 5: mod_base = OTHER; note = 2'-O-methylcytidine
  modified_base 6: mod_base = OTHER; note = 2'-fluoroguanosine
  modified_base 7: mod_base = OTHER; note = 2'-O-methylguanosine
  modified_base 8: mod_base = OTHER; note = 2'-fluoroguanosine
  modified_base 9: mod_base = OTHER; note = 2'-fluorocytidine
  modified_base 10: mod_base = OTHER; note = 2'-O-methyluridine
  modified_base 11: mod_base = OTHER; note = 2'-O-methylguanosine
  modified_base 12: mod_base = OTHER; note = 2'-O-methyladenosine
  modified_base 13: mod_base = OTHER; note = 2'-O-methyluridine
  modified_base 14: mod_base = OTHER; note = 2'-fluoroguanosine
  modified_base 15: mod_base = OTHER; note = 2'-O-methylcytidine
  modified_base 16: mod_base = OTHER; note = 2'-fluorouridine
  modified_base 17: mod_base = OTHER; note = 2'-O-methylcytidine
  modified_base 18: mod_base = OTHER; note = 2'-O-methylguanosine
  modified_base 19: mod_base = OTHER; note = 2'-O-methylguanosine
  modified_base 20: mod_base = OTHER; note = 2'-O-methylcytidine
  modified_base 21: mod_base = OTHER; note = 2'-O-methyluridine with phosphorothioate linkage
  modified_base 22: mod_base = OTHER; note = 2'-O-methylguanosine with phosphorothioate linkage
  modified_base 23: mod_base = OTHER; note = 2'-O-methylcytidine
ttttcgggctgatgctcggctgc

SEQ ID NO: 919 - RNA, 23 nt, synthetic construct
  source 1..23: mol_type = other RNA
  modified_base 1: mod_base = OTHER; note = 5'-vinyl-phosphonate-2'-O-methyluridine with phosphorothioate linkage
  modified_base 2: mod_base = OTHER; note = 2'-fluorouridine with phosphorothioate linkage
  modified_base 3: mod_base = OTHER; note = 2'-O-methylcytidine
  modified_base 4: mod_base = OTHER; note = 2'-O-methylcytidine
  modified_base 5: mod_base = OTHER; note = 2'-O-methyluridine
  modified_base 6: mod_base = OTHER; note = 2'-fluorouridine
  modified_base 7: mod_base = OTHER; note = 2'-O-methyluridine
  modified_base 8: mod_base = OTHER; note = 2'-fluorocytidine
  modified_base 9: mod_base = OTHER; note = 2'-fluoroguanosine
  modified_base 10: mod_base = OTHER; note = 2'-O-methylguanosine
  modified_base 11: mod_base = OTHER; note = 2'-O-methylguanosine
  modified_base 12: mod_base = OTHER; note = 2'-O-methylcytidine
  modified_base 13: mod_base = OTHER; note = 2'-O-methyluridine
  modified_base 14: mod_base = OTHER; note = 2'-fluoroguanosine
  modified_base 15: mod_base = OTHER; note = 2'-O-methyladenosine
  modified_base 16: mod_base = OTHER; note = 2'-fluorouridine
  modified_base 17: mod_base = OTHER; note = 2'-O-methylguanosine
  modified_base 18: mod_base = OTHER; note = 2'-O-methylcytidine
  modified_base 19: mod_base = OTHER; note = 2'-O-methyluridine
  modified_base 20: mod_base = OTHER; note = 2'-O-methylcytidine
  modified_base 21: mod_base = OTHER; note = 2'-O-methylguanosine with phosphorothioate linkage
  modified_base 22: mod_base = OTHER; note = 2'-O-methylguanosine with phosphorothioate linkage
  modified_base 23: mod_base = OTHER; note = 2'-O-methylcytidine
ttcctttcgggctgatgctcggc

SEQ ID NO: 920 - RNA, 23 nt, synthetic construct
  source 1..23: mol_type = other RNA
  modified_base 1: mod_base = OTHER; note = 5'-vinyl-phosphonate-2'-O-methyluridine with phosphorothioate linkage
  modified_base 2: mod_base = OTHER; note = 2'-fluorouridine with phosphorothioate linkage
  modified_base 3: mod_base = OTHER; note = 2'-O-methylcytidine
  modified_base 4: mod_base = OTHER; note = 2'-O-methylguanosine
  modified_base 5: mod_base = OTHER; note = 2'-O-methyluridine
  modified_base 6: mod_base = OTHER; note = 2'-fluoroguanosine
  modified_base 7: mod_base = OTHER; note = 2'-O-methylcytidine
  modified_base 8: mod_base = OTHER; note = 2'-fluorouridine
  modified_base 9: mod_base = OTHER; note = 2'-fluorouridine
  modified_base 10: mod_base = OTHER; note = 2'-O-methylcytidine
  modified_base 11: mod_base = OTHER; note = 2'-O-methylcytidine
  modified_base 12: mod_base = OTHER; note = 2'-O-methyluridine
  modified_base 13: mod_base = OTHER; note = 2'-O-methyluridine
  modified_base 14: mod_base = OTHER; note = 2'-fluorouridine
  modified_base 15: mod_base = OTHER; note = 2'-O-methylcytidine
  modified_base 16: mod_base = OTHER; note = 2'-fluoroguanosine
  modified_base 17: mod_base = OTHER; note = 2'-O-methylguanosine
  modified_base 18: mod_base = OTHER; note = 2'-O-methylguanosine
  modified_base 19: mod_base = OTHER; note = 2'-O-methylcytidine
  modified_base 20: mod_base = OTHER; note = 2'-O-methyluridine
  modified_base 21: mod_base = OTHER; note = 2'-O-methylguanosine with phosphorothioate linkage
  modified_base 22: mod_base = OTHER; note = 2'-O-methyladenosine with phosphorothioate linkage
  modified_base 23: mod_base = OTHER; note = 2'-O-methyluridine
ttcgtgcttcctttcgggctgat

SEQ ID NO: 921 - RNA, 23 nt, synthetic construct
  source 1..23: mol_type = other RNA
  modified_base 1: mod_base = OTHER; note = 5'-vinyl-phosphonate-2'-O-methyluridine with phosphorothioate linkage
  modified_base 2: mod_base = OTHER; note = 2'-fluorouridine with phosphorothioate linkage
  modified_base 3: mod_base = OTHER; note = 2'-O-methyluridine
  modified_base 4: mod_base = OTHER; note = 2'-O-methylcytidine
  modified_base 5: mod_base = OTHER; note = 2'-O-methylguanosine
  modified_base 6: mod_base = OTHER; note = 2'-fluorouridine
  modified_base 7: mod_base = OTHER; note = 2'-O-methylguanosine
  modified_base 8: mod_base = OTHER; note = 2'-fluorocytidine
  modified_base 9: mod_base = OTHER; note = 2'-fluorouridine
  modified_base 10: mod_base = OTHER; note = 2'-O-methyluridine
  modified_base 11: mod_base = OTHER; note = 2'-O-methylcytidine
  modified_base 12: mod_base = OTHER; note = 2'-O-methylcytidine
  modified_base 13: mod_base = OTHER; note = 2'-O-methyluridine
  modified_base 14: mod_base = OTHER; note = 2'-fluorouridine
  modified_base 15: mod_base = OTHER; note = 2'-O-methyluridine
  modified_base 16: mod_base = OTHER; note = 2'-fluorocytidine
  modified_base 17: mod_base = OTHER; note = 2'-O-methylguanosine
  modified_base 18: mod_base = OTHER; note = 2'-O-methylguanosine
  modified_base 19: mod_base = OTHER; note = 2'-O-methylguanosine
  modified_base 20: mod_base = OTHER; note = 2'-O-methylcytidine
  modified_base 21: mod_base = OTHER; note = 2'-O-methyluridine with phosphorothioate linkage
  modified_base 22: mod_base = OTHER; note = 2'-O-methylguanosine with phosphorothioate linkage
  modified_base 23: mod_base = OTHER; note = 2'-O-methyladenosine
tttcgtgcttcctttcgggctga

SEQ ID NO: 922 - RNA, 23 nt, synthetic construct
  source 1..23: mol_type = other RNA
  modified_base 1: mod_base = OTHER; note = 5'-vinyl-phosphonate-2'-O-methyluridine with phosphorothioate linkage
  modified_base 2: mod_base = OTHER; note = 2'-fluorouridine with phosphorothioate linkage
  modified_base 3: mod_base = OTHER; note = 2'-O-methyluridine
  modified_base 4: mod_base = OTHER; note = 2'-O-methyluridine
  modified_base 5: mod_base = OTHER; note = 2'-O-methylcytidine
  modified_base 6: mod_base = OTHER; note = 2'-fluoroguanosine
  modified_base 7: mod_base = OTHER; note = 2'-O-methyluridine
  modified_base 8: mod_base = OTHER; note = 2'-fluoroguanosine
  modified_base 9: mod_base = OTHER; note = 2'-fluorocytidine
  modified_base 10: mod_base = OTHER; note = 2'-O-methyluridine
  modified_base 11: mod_base = OTHER; note = 2'-O-methyluridine
  modified_base 12: mod_base = OTHER; note = 2'-O-methylcytidine
  modified_base 13: mod_base = OTHER; note = 2'-O-methylcytidine
  modified_base 14: mod_base = OTHER; note = 2'-fluorouridine
  modified_base 15: mod_base = OTHER; note = 2'-O-methyluridine
  modified_base 16: mod_base = OTHER; note = 2'-fluorouridine
  modified_base 17: mod_base = OTHER; note = 2'-O-methylcytidine
  modified_base 18: mod_base = OTHER; note = 2'-O-methylguanosine
  modified_base 19: mod_base = OTHER; note = 2'-O-methylguanosine
  modified_base 20: mod_base = OTHER; note = 2'-O-methylguanosine
  modified_base 21: mod_base = OTHER; note = 2'-O-methylcytidine with phosphorothioate linkage
  modified_base 22: mod_base = OTHER; note = 2'-O-methyluridine with phosphorothioate linkage
  modified_base 23: mod_base = OTHER; note = 2'-O-methylguanosine
ttttcgtgcttcctttcgggctg

SEQ ID NO: 923 - RNA, 23 nt, synthetic construct
  source 1..23: mol_type = other RNA
  modified_base 1: mod_base = OTHER; note = 5'-vinyl-phosphonate-2'-O-methyluridine with phosphorothioate linkage
  modified_base 2: mod_base = OTHER; note = 2'-fluoroguanosine with phosphorothioate linkage
  modified_base 3: mod_base = OTHER; note = 2'-O-methyluridine
  modified_base 4: mod_base = OTHER; note = 2'-O-methylcytidine
  modified_base 5: mod_base = OTHER; note = 2'-O-methylguanosine
  modified_base 6: mod_base = OTHER; note = 2'-fluorocytidine
  modified_base 7: mod_base = OTHER; note = 2'-O-methylcytidine
  modified_base 8: mod_base = OTHER; note = 2'-fluoroguanosine
  modified_base 9: mod_base = OTHER; note = 2'-fluoroguanosine
  modified_base 10: mod_base = OTHER; note = 2'-O-methyluridine
  modified_base 11: mod_base = OTHER; note = 2'-O-methylcytidine
  modified_base 12: mod_base = OTHER; note = 2'-O-methylcytidine
  modified_base 13: mod_base = OTHER; note = 2'-O-methyladenosine
  modified_base 14: mod_base = OTHER; note = 2'-fluorocytidine
  modified_base 15: mod_base = OTHER; note = 2'-O-methylguanosine
  modified_base 16: mod_base = OTHER; note = 2'-fluorocytidine
  modified_base 17: mod_base = OTHER; note = 2'-O-methylcytidine
  modified_base 18: mod_base = OTHER; note = 2'-O-methylguanosine
  modified_base 19: mod_base = OTHER; note = 2'-O-methylcytidine
  modified_base 20: mod_base = OTHER; note = 2'-O-methylcytidine
  modified_base 21: mod_base = OTHER; note = 2'-O-methylguanosine with phosphorothioate linkage
  modified_base 22: mod_base = OTHER; note = 2'-O-methylcytidine with phosphorothioate linkage
  modified_base 23: mod_base = OTHER; note = 2'-O-methylcytidine
tgtcgccggtccacgccgccgcc

SEQ ID NO: 924 - RNA, 23 nt, synthetic construct
  source 1..23: mol_type = other RNA
  modified_base 1: mod_base = OTHER; note = 5'-vinyl-phosphonate-2'-O-methyluridine with phosphorothioate linkage
  modified_base 2: mod_base = OTHER; note = 2'-fluorocytidine with phosphorothioate linkage
  modified_base 3: mod_base = OTHER; note = 2'-O-methylguanosine
  modified_base 4: mod_base = OTHER; note = 2'-O-methyluridine
  modified_base 5: mod_base = OTHER; note = 2'-O-methylcytidine
  modified_base 6: mod_base = OTHER; note = 2'-fluoroguanosine
  modified_base 7: mod_base = OTHER; note = 2'-O-methylcytidine
  modified_base 8: mod_base = OTHER; note = 2'-fluorocytidine
  modified_base 9: mod_base = OTHER; note = 2'-fluoroguanosine
  modified_base 10: mod_base = OTHER; note = 2'-O-methylguanosine
  modified_base 11: mod_base = OTHER; note = 2'-O-methyluridine
  modified_base 12: mod_base = OTHER; note = 2'-O-methylcytidine
  modified_base 13: mod_base = OTHER; note = 2'-O-methylcytidine
  modified_base 14: mod_base = OTHER; note = 2'-fluoroadenosine
  modified_base 15: mod_base = OTHER; note = 2'-O-methylcytidine
  modified_base 16: mod_base = OTHER; note = 2'-fluoroguanosine
  modified_base 17: mod_base = OTHER; note = 2'-O-methylcytidine
  modified_base 18: mod_base = OTHER; note = 2'-O-methylcytidine
  modified_base 19: mod_base = OTHER; note = 2'-O-methylguanosine
  modified_base 20: mod_base = OTHER; note = 2'-O-methylcytidine
  modified_base 21: mod_base = OTHER; note = 2'-O-methylcytidine with phosphorothioate linkage
  modified_base 22: mod_base = OTHER; note = 2'-O-methylguanosine with phosphorothioate linkage
  modified_base 23: mod_base = OTHER; note = 2'-O-methylcytidine
tcgtcgccggtccacgccgccgc

SEQ ID NO: 925 - RNA, 23 nt, synthetic construct
  source 1..23: mol_type = other RNA
  modified_base 1: mod_base = OTHER; note = 5'-vinyl-phosphonate-2'-O-methyluridine with phosphorothioate linkage
  modified_base 2: mod_base = OTHER; note = 2'-fluorocytidine with phosphorothioate linkage
  modified_base 3: mod_base = OTHER; note = 2'-O-methylcytidine
  modified_base 4: mod_base = OTHER; note = 2'-O-methylguanosine
  modified_base 5: mod_base = OTHER; note = 2'-O-methyluridine
  modified_base 6: mod_base = OTHER; note = 2'-fluorocytidine
  modified_base 7: mod_base = OTHER; note = 2'-O-methylguanosine
  modified_base 8: mod_base = OTHER; note = 2'-fluorocytidine
  modified_base 9: mod_base = OTHER; note = 2'-fluorocytidine
  modified_base 10: mod_base = OTHER; note = 2'-O-methylguanosine
  modified_base 11: mod_base = OTHER; note = 2'-O-methylguanosine
  modified_base 12: mod_base = OTHER; note = 2'-O-methyluridine
  modified_base 13: mod_base = OTHER; note = 2'-O-methylcytidine
  modified_base 14: mod_base = OTHER; note = 2'-fluorocytidine
  modified_base 15: mod_base = OTHER; note = 2'-O-methyladenosine
  modified_base 16: mod_base = OTHER; note = 2'-fluorocytidine
  modified_base 17: mod_base = OTHER; note = 2'-O-methylguanosine
  modified_base 18: mod_base = OTHER; note = 2'-O-methylcytidine
  modified_base 19: mod_base = OTHER; note = 2'-O-methylcytidine
  modified_base 20: mod_base = OTHER; note = 2'-O-methylguanosine
  modified_base 21: mod_base = OTHER; note = 2'-O-methylcytidine with phosphorothioate linkage
  modified_base 22: mod_base = OTHER; note = 2'-O-methylcytidine with phosphorothioate linkage
  modified_base 23: mod_base = OTHER; note = 2'-O-methylguanosine
tccgtcgccggtccacgccgccg

SEQ ID NO: 926 - RNA, 23 nt, synthetic construct
  source 1..23: mol_type = other RNA
  modified_base 1: mod_base = OTHER; note = 5'-vinyl-phosphonate-2'-O-methyluridine with phosphorothioate linkage
  modified_base 2: mod_base = OTHER; note = 2'-fluoroguanosine with phosphorothioate linkage
  modified_base 3: mod_base = OTHER; note = 2'-O-methylcytidine
  modified_base 4: mod_base = OTHER; note = 2'-O-methylcytidine
  modified_base 5: mod_base = OTHER; note = 2'-O-methyladenosine
  modified_base 6: mod_base = OTHER; note = 2'-fluorocytidine
  modified_base 7: mod_base = OTHER; note = 2'-O-methylcytidine
  modified_base 8: mod_base = OTHER; note = 2'-fluorocytidine
  modified_base 9: mod_base = OTHER; note = 2'-fluoroguanosine
  modified_base 10: mod_base = OTHER; note = 2'-O-methyluridine
  modified_base 11: mod_base = OTHER; note = 2'-O-methylcytidine
  modified_base 12: mod_base = OTHER; note = 2'-O-methylguanosine
  modified_base 13: mod_base = OTHER; note = 2'-O-methylcytidine
  modified_base 14: mod_base = OTHER; note = 2'-fluorocytidine
  modified_base 15: mod_base = OTHER; note = 2'-O-methylguanosine
  modified_base 16: mod_base = OTHER; note = 2'-fluoroguanosine
  modified_base 17: mod_base = OTHER; note = 2'-O-methyluridine
  modified_base 18: mod_base = OTHER; note = 2'-O-methylcytidine
  modified_base 19: mod_base = OTHER; note = 2'-O-methylcytidine
  modified_base 20: mod_base = OTHER; note = 2'-O-methyladenosine
  modified_base 21: mod_base = OTHER; note = 2'-O-methylcytidine with phosphorothioate linkage
  modified_base 22: mod_base = OTHER; note = 2'-O-methylguanosine with phosphorothioate linkage
  modified_base 23: mod_base = OTHER; note = 2'-O-methylcytidine
tgccacccgtcgccggtccacgc

SEQ ID NO: 927 - RNA, 23 nt, synthetic construct
  source 1..23: mol_type = other RNA
  modified_base 1: mod_base = OTHER; note = 5'-vinyl-phosphonate-2'-O-methyluridine with phosphorothioate linkage
  modified_base 2: mod_base = OTHER; note = 2'-fluorouridine with phosphorothioate linkage
  modified_base 3: mod_base = OTHER; note = 2'-O-methylguanosine
  modified_base 4: mod_base = OTHER; note = 2'-O-methylcytidine
  modified_base 5: mod_base = OTHER; note = 2'-O-methylcytidine
  modified_base 6: mod_base = OTHER; note = 2'-fluoroadenosine
  modified_base 7: mod_base = OTHER; note = 2'-O-methylcytidine
  modified_base 8: mod_base = OTHER; note = 2'-fluorocytidine
  modified_base 9: mod_base = OTHER; note = 2'-fluorocytidine
  modified_base 10: mod_base = OTHER; note = 2'-O-methylguanosine
  modified_base 11: mod_base = OTHER; note = 2'-O-methyluridine
  modified_base 12: mod_base = OTHER; note = 2'-O-methylcytidine
  modified_base 13: mod_base = OTHER; note = 2'-O-methylguanosine
  modified_base 14: mod_base = OTHER; note = 2'-fluorocytidine
  modified_base 15: mod_base = OTHER; note = 2'-O-methylcytidine
  modified_base 16: mod_base = OTHER; note = 2'-fluoroguanosine
  modified_base 17: mod_base = OTHER; note = 2'-O-methylguanosine
  modified_base 18: mod_base = OTHER; note = 2'-O-methyluridine
  modified_base 19: mod_base = OTHER; note = 2'-O-methylcytidine
  modified_base 20: mod_base = OTHER; note = 2'-O-methylcytidine
  modified_base 21: mod_base = OTHER; note = 2'-O-methyladenosine with phosphorothioate linkage
  modified_base 22: mod_base = OTHER; note = 2'-O-methylcytidine with phosphorothioate linkage
  modified_base 23: mod_base = OTHER; note = 2'-O-methylguanosine
ttgccacccgtcgccggtccacg

SEQ ID NO: 928 - RNA, 23 nt, synthetic construct
  source 1..23: mol_type = other RNA
  modified_base 1: mod_base = OTHER; note = 5'-vinyl-phosphonate-2'-O-methyluridine with phosphorothioate linkage
  modified_base 2: mod_base = OTHER; note = 2'-fluoroguanosine with phosphorothioate linkage
  modified_base 3: mod_base = OTHER; note = 2'-O-methyluridine
  modified_base 4: mod_base = OTHER; note = 2'-O-methylguanosine
  modified_base 5: mod_base = OTHER; note = 2'-O-methylcytidine
  modified_base 6: mod_base = OTHER; note = 2'-fluorocytidine
  modified_base 7: mod_base = OTHER; note = 2'-O-methyladenosine
  modified_base 8: mod_base = OTHER; note = 2'-fluorocytidine
  modified_base 9: mod_base = OTHER; note = 2'-fluorocytidine
  modified_base 10: mod_base = OTHER; note = 2'-O-methylcytidine
  modified_base 11: mod_base = OTHER; note = 2'-O-methylguanosine
  modified_base 12: mod_base = OTHER; note = 2'-O-methyluridine
  modified_base 13: mod_base = OTHER; note = 2'-O-methylcytidine
  modified_base 14: mod_base = OTHER; note = 2'-fluoroguanosine
  modified_base 15: mod_base = OTHER; note = 2'-O-methylcytidine
  modified_base 16: mod_base = OTHER; note = 2'-fluorocytidine
  modified_base 17: mod_base = OTHER; note = 2'-O-methylguanosine
  modified_base 18: mod_base = OTHER; note = 2'-O-methylguanosine
  modified_base 19: mod_base = OTHER; note = 2'-O-methyluridine
  modified_base 20: mod_base = OTHER; note = 2'-O-methylcytidine
  modified_base 21: mod_base = OTHER; note = 2'-O-methylcytidine with phosphorothioate linkage
  modified_base 22: mod_base = OTHER; note = 2'-O-methyladenosine with phosphorothioate linkage
  modified_base 23: mod_base = OTHER; note = 2'-O-methylcytidine
tgtgccacccgtcgccggtccac

SEQ ID NO: 929 - RNA, 23 nt, synthetic construct
  source 1..23: mol_type = other RNA
  modified_base 1: mod_base = OTHER; note = 5'-vinyl-phosphonate-2'-O-methyluridine with phosphorothioate linkage
  modified_base 2: mod_base = OTHER; note = 2'-fluorouridine with phosphorothioate linkage
  modified_base 3: mod_base = OTHER; note = 2'-O-methylguanosine
  modified_base 4: mod_base = OTHER; note = 2'-O-methyluridine
  modified_base 5: mod_base = OTHER; note = 2'-O-methylguanosine
  modified_base 6: mod_base = OTHER; note = 2'-fluorocytidine
  modified_base 7: mod_base = OTHER; note = 2'-O-methylcytidine
  modified_base 8: mod_base = OTHER; note = 2'-fluoroadenosine
  modified_base 9: mod_base = OTHER; note = 2'-fluorocytidine
  modified_base 10: mod_base = OTHER; note = 2'-O-methylcytidine
  modified_base 11: mod_base = OTHER; note = 2'-O-methylcytidine
  modified_base 12: mod_base = OTHER; note = 2'-O-methylguanosine
  modified_base 13: mod_base = OTHER; note = 2'-O-methyluridine
  modified_base 14: mod_base = OTHER; note = 2'-fluorocytidine
  modified_base 15: mod_base = OTHER; note = 2'-O-methylguanosine
  modified_base 16: mod_base = OTHER; note = 2'-fluorocytidine
  modified_base 17: mod_base = OTHER; note = 2'-O-methylcytidine
  modified_base 18: mod_base = OTHER; note = 2'-O-methylguanosine
  modified_base 19: mod_base = OTHER; note = 2'-O-methylguanosine
  modified_base 20: mod_base = OTHER; note = 2'-O-methyluridine
  modified_base 21: mod_base = OTHER; note = 2'-O-methylcytidine with phosphorothioate linkage
  modified_base 22: mod_base = OTHER; note = 2'-O-methylcytidine with phosphorothioate linkage
  modified_base 23: mod_base = OTHER; note = 2'-O-methyladenosine
ttgtgccacccgtcgccggtcca

SEQ ID NO: 930 - RNA, 23 nt, synthetic construct
  source 1..23: mol_type = other RNA
  modified_base 1: mod_base = OTHER; note = 5'-vinyl-phosphonate-2'-O-methyluridine with phosphorothioate linkage
  modified_base 2: mod_base = OTHER; note = 2'-fluoroadenosine with phosphorothioate linkage
  modified_base 3: mod_base = OTHER; note = 2'-O-methylguanosine
  modified_base 4: mod_base = OTHER; note = 2'-O-methylcytidine
  modified_base 5: mod_base = OTHER; note = 2'-O-methyluridine
  modified_base 6: mod_base = OTHER; note = 2'-fluoroguanosine
  modified_base 7: mod_base = OTHER; note = 2'-O-methyluridine
  modified_base 8: mod_base = OTHER; note = 2'-fluoroguanosine
  modified_base 9: mod_base = OTHER; note = 2'-fluorocytidine
  modified_base 10: mod_base = OTHER; note = 2'-O-methylcytidine
  modified_base 11: mod_base = OTHER; note = 2'-O-methyladenosine
  modified_base 12: mod_base = OTHER; note = 2'-O-methylcytidine
  modified_base 13: mod_base = OTHER; note = 2'-O-methylcytidine
  modified_base 14: mod_base = OTHER; note = 2'-fluorocytidine
  modified_base 15: mod_base = OTHER; note = 2'-O-methylguanosine
  modified_base 16: mod_base = OTHER; note = 2'-fluorouridine
  modified_base 17: mod_base = OTHER; note = 2'-O-methylcytidine
  modified_base 18: mod_base = OTHER; note = 2'-O-methylguanosine
  modified_base 19: mod_base = OTHER; note = 2'-O-methylcytidine
  modified_base 20: mod_base = OTHER; note = 2'-O-methylcytidine
  modified_base 21: mod_base = OTHER; note = 2'-O-methylguanosine with phosphorothioate linkage
  modified_base 22: mod_base = OTHER; note = 2'-O-methylguanosine with phosphorothioate linkage
  modified_base 23: mod_base = OTHER; note = 2'-O-methyluridine
tagctgtgccacccgtcgccggt

SEQ ID NO: 931 - RNA, 23 nt, synthetic construct
  source 1..23: mol_type = other RNA
  modified_base 1: mod_base = OTHER; note = 5'-vinyl-phosphonate-2'-O-methyluridine with phosphorothioate linkage
  modified_base 2: mod_base = OTHER; note = 2'-fluorocytidine with phosphorothioate linkage
  modified_base 3: mod_base = OTHER; note = 2'-O-methylcytidine
  modified_base 4: mod_base = OTHER; note = 2'-O-methyladenosine
  modified_base 5: mod_base = OTHER; note = 2'-O-methylguanosine
  modified_base 6: mod_base = OTHER; note = 2'-fluorocytidine
  modified_base 7: mod_base = OTHER; note = 2'-O-methyluridine
  modified_base 8: mod_base = OTHER; note = 2'-fluoroguanosine
  modified_base 9: mod_base = OTHER; note = 2'-fluorouridine
  modified_base 10: mod_base = OTHER; note = 2'-O-methylguanosine
  modified_base 11: mod_base = OTHER; note = 2'-O-methylcytidine
  modified_base 12: mod_base = OTHER; note = 2'-O-methylcytidine
  modified_base 13: mod_base = OTHER; note = 2'-O-methyladenosine
  modified_base 14: mod_base = OTHER; note = 2'-fluorocytidine
  modified_base 15: mod_base = OTHER; note = 2'-O-methylcytidine
  modified_base 16: mod_base = OTHER; note = 2'-fluorocytidine
  modified_base 17: mod_base = OTHER; note = 2'-O-methylguanosine
  modified_base 18: mod_base = OTHER; note = 2'-O-methyluridine
  modified_base 19: mod_base = OTHER; note = 2'-O-methylcytidine
  modified_base 20: mod_base = OTHER; note = 2'-O-methylguanosine
  modified_base 21: mod_base = OTHER; note = 2'-O-methylcytidine with phosphorothioate linkage
  modified_base 22: mod_base = OTHER; note = 2'-O-methylcytidine with phosphorothioate linkage
  modified_base 23: mod_base = OTHER; note = 2'-O-methylguanosine
tccagctgtgccacccgtcgccg

SEQ ID NO: 932 - RNA, 23 nt, synthetic construct
  source 1..23: mol_type = other RNA
  modified_base 1: mod_base = OTHER; note = 5'-vinyl-phosphonate-2'-O-methyluridine with phosphorothioate linkage
  modified_base 2: mod_base = OTHER; note = 2'-fluorocytidine with phosphorothioate linkage
  modified_base 3: mod_base = OTHER; note = 2'-O-methylguanosine
  modified_base 4: mod_base = OTHER; note = 2'-O-methyluridine
  modified_base 5: mod_base = OTHER; note = 2'-O-methyladenosine
  modified_base 6: mod_base = OTHER; note = 2'-fluorouridine
  modified_base 7: mod_base = OTHER; note = 2'-O-methylguanosine
  modified_base 8: mod_base = OTHER; note = 2'-fluorocytidine
  modified_base 9: mod_base = OTHER; note = 2'-fluorocytidine
  modified_base 10: mod_base = OTHER; note = 2'-O-methyladenosine
  modified_base 11: mod_base = OTHER; note = 2'-O-methylguanosine
  modified_base 12: mod_base = OTHER; note = 2'-O-methylcytidine
  modified_base 13: mod_base = OTHER; note = 2'-O-methyluridine
  modified_base 14: mod_base = OTHER; note = 2'-fluoroguanosine
  modified_base 15: mod_base = OTHER; note = 2'-O-methyluridine
  modified_base 16: mod_base = OTHER; note = 2'-fluoroguanosine
  modified_base 17: mod_base = OTHER; note = 2'-O-methylcytidine
  modified_base 18: mod_base = OTHER; note = 2'-O-methylcytidine
  modified_base 19: mod_base = OTHER; note = 2'-O-methyladenosine
  modified_base 20: mod_base = OTHER; note = 2'-O-methylcytidine
  modified_base 21: mod_base = OTHER; note = 2'-O-methylcytidine with phosphorothioate linkage
  modified_base 22: mod_base = OTHER; note = 2'-O-methylcytidine with phosphorothioate linkage
  modified_base 23: mod_base = OTHER; note = 2'-O-methylguanosine
tcgtatgccagctgtgccacccg

SEQ ID NO: 933 - RNA, 23 nt, synthetic construct
  source 1..23: mol_type = other RNA
  modified_base 1: mod_base = OTHER; note = 5'-vinyl-phosphonate-2'-O-methyluridine with phosphorothioate linkage
  modified_base 2: mod_base = OTHER; note = 2'-fluoroguanosine with phosphorothioate linkage
  modified_base 3: mod_base = OTHER; note = 2'-O-methylcytidine
  modified_base 4: mod_base = OTHER; note = 2'-O-methylguanosine
  modified_base 5: mod_base = OTHER; note = 2'-O-methyluridine
  modified_base 6: mod_base = OTHER; note = 2'-fluoroadenosine
  modified_base 7: mod_base = OTHER; note = 2'-O-methyluridine
  modified_base 8: mod_base = OTHER; note = 2'-fluoroguanosine
  modified_base 9: mod_base = OTHER; note = 2'-fluorocytidine
  modified_base 10: mod_base = OTHER; note = 2'-O-methylcytidine
  modified_base 11: mod_base = OTHER; note = 2'-O-methyladenosine
  modified_base 12: mod_base = OTHER; note = 2'-O-methylguanosine
  modified_base 13: mod_base = OTHER; note = 2'-O-methylcytidine
  modified_base 14: mod_base = OTHER; note = 2'-fluorouridine
  modified_base 15: mod_base = OTHER; note = 2'-O-methylguanosine
  modified_base 16: mod_base = OTHER; note = 2'-fluorouridine
  modified_base 17: mod_base = OTHER; note = 2'-O-methylguanosine
  modified_base 18: mod_base = OTHER; note = 2'-O-methylcytidine
  modified_base 19: mod_base = OTHER; note = 2'-O-methylcytidine
  modified_base 20: mod_base = OTHER; note = 2'-O-methyladenosine
  modified_base 21: mod_base = OTHER; note = 2'-O-methylcytidine with phosphorothioate linkage
  modified_base 22: mod_base = OTHER; note = 2'-O-methylcytidine with phosphorothioate linkage
  modified_base 23: mod_base = OTHER; note = 2'-O-methylcytidine
tgcgtatgccagctgtgccaccc

SEQ ID NO: 934 - RNA, 23 nt, synthetic construct
  source 1..23: mol_type = other RNA
  modified_base 1: mod_base = OTHER; note = 5'-vinyl-phosphonate-2'-O-methyluridine with phosphorothioate linkage
  modified_base 2: mod_base = OTHER; note = 2'-fluorocytidine with phosphorothioate linkage
  modified_base 3: mod_base = OTHER; note = 2'-O-methylguanosine
  modified_base 4: mod_base = OTHER; note = 2'-O-methylcytidine
  modified_base 5: mod_base = OTHER; note = 2'-O-methylguanosine
  modified_base 6: mod_base = OTHER; note = 2'-fluorouridine
  modified_base 7: mod_base = OTHER; note = 2'-O-methyladenosine
  modified_base 8: mod_base = OTHER; note = 2'-fluorouridine
  modified_base 9: mod_base = OTHER; note = 2'-fluoroguanosine
  modified_base 10: mod_base = OTHER; note = 2'-O-methylcytidine
  modified_base 11: mod_base = OTHER; note = 2'-O-methylcytidine
  modified_base 12: mod_base = OTHER; note = 2'-O-methyladenosine
  modified_base 13: mod_base = OTHER; note = 2'-O-methylguanosine
  modified_base 14: mod_base = OTHER; note = 2'-fluorocytidine
  modified_base 15: mod_base = OTHER; note = 2'-O-methyluridine
  modified_base 16: mod_base = OTHER; note = 2'-fluoroguanosine
  modified_base 17: mod_base = OTHER; note = 2'-O-methyluridine
  modified_base 18: mod_base = OTHER; note = 2'-O-methylguanosine
  modified_base 19: mod_base = OTHER; note = 2'-O-methylcytidine
  modified_base 20: mod_base = OTHER; note = 2'-O-methylcytidine
  modified_base 21: mod_base = OTHER; note = 2'-O-methyladenosine with phosphorothioate linkage
  modified_base 22: mod_base = OTHER; note = 2'-O-methylcytidine with phosphorothioate linkage
  modified_base 23: mod_base = OTHER; note = 2'-O-methylcytidine
tcgcgtatgccagctgtgccacc

SEQ ID NO: 935 - RNA, 23 nt, synthetic construct
  source 1..23: mol_type = other RNA
  modified_base 1: mod_base = OTHER; note = 5'-vinyl-phosphonate-2'-O-methyluridine with phosphorothioate linkage
  modified_base 2: mod_base = OTHER; note = 2'-fluorouridine with phosphorothioate linkage
  modified_base 3: mod_base = OTHER; note = 2'-O-methylcytidine
  modified_base 4: mod_base = OTHER; note = 2'-O-methyluridine
  modified_base 5: mod_base = OTHER; note = 2'-O-methyladenosine
  modified_base 6: mod_base = OTHER; note = 2'-fluorocytidine
  modified_base 7: mod_base = OTHER; note = 2'-O-methylcytidine
  modified_base 8: mod_base = OTHER; note = 2'-fluoroguanosine
  modified_base 9: mod_base = OTHER; note = 2'-fluorocytidine
  modified_base 10: mod_base = OTHER; note = 2'-O-methylcytidine
  modified_base 11: mod_base = OTHER; note = 2'-O-methyladenosine
  modified_base 12: mod_base = OTHER; note = 2'-O-methylcytidine
  modified_base 13: mod_base = OTHER; note = 2'-O-methylcytidine
  modified_base 14: mod_base = OTHER; note = 2'-fluorouridine
  modified_base 15: mod_base = OTHER; note = 2'-O-methylguanosine
  modified_base 16: mod_base = OTHER; note = 2'-fluorouridine
  modified_base 17: mod_base = OTHER; note = 2'-O-methylguanosine
  modified_base 18: mod_base = OTHER; note = 2'-O-methylguanosine
  modified_base 19: mod_base = OTHER; note = 2'-O-methyladenosine
  modified_base 20: mod_base = OTHER; note = 2'-O-methylguanosine
  modified_base 21: mod_base = OTHER; note = 2'-O-methylguanosine with phosphorothioate linkage
  modified_base 22: mod_base = OTHER; note = 2'-O-methylguanosine with phosphorothioate linkage
  modified_base 23: mod_base = OTHER; note = 2'-O-methyladenosine
ttctaccgccacctgtggaggga

SEQ ID NO: 936 - RNA, 23 nt, synthetic construct
  source 1..23: mol_type = other RNA
  modified_base 1: mod_base = OTHER; note = 5'-vinyl-phosphonate-2'-O-methyluridine with phosphorothioate linkage
  modified_base 2: mod_base = OTHER; note = 2'-fluorocytidine with phosphorothioate linkage
  modified_base 3: mod_base = OTHER; note = 2'-O-methylguanosine
  modified_base 4: mod_base = OTHER; note = 2'-O-methyluridine
  modified_base 5: mod_base = OTHER; note = 2'-O-methylcytidine
  modified_base 6: mod_base = OTHER; note = 2'-fluorouridine
  modified_base 7: mod_base = OTHER; note = 2'-O-methyladenosine
  modified_base 8: mod_base = OTHER; note = 2'-fluorocytidine
  modified_base 9: mod_base = OTHER; note = 2'-fluorocytidine
  modified_base 10: mod_base = OTHER; note = 2'-O-methylguanosine
  modified_base 11: mod_base = OTHER; note = 2'-O-methylcytidine
  modified_base 12: mod_base = OTHER; note = 2'-O-methylcytidine
  modified_base 13: mod_base = OTHER; note = 2'-O-methyladenosine
  modified_base 14: mod_base = OTHER; note = 2'-fluorocytidine
  modified_base 15: mod_base = OTHER; note = 2'-O-methylcytidine
  modified_base 16: mod_base = OTHER; note = 2'-fluorouridine
  modified_base 17: mod_base = OTHER; note = 2'-O-methylguanosine
  modified_base 18: mod_base = OTHER; note = 2'-O-methyluridine
  modified_base 19: mod_base = OTHER; note = 2'-O-methylguanosine
  modified_base 20: mod_base = OTHER; note = 2'-O-methylguanosine
  modified_base 21: mod_base = OTHER; note = 2'-O-methyladenosine with phosphorothioate linkage
  modified_base 22: mod_base = OTHER; note = 2'-O-methylguanosine with phosphorothioate linkage
  modified_base 23: mod_base = OTHER; note = 2'-O-methylguanosine
tcgtctaccgccacctgtggagg

SEQ ID NO: 937 - RNA, 23 nt, synthetic construct
  source 1..23: mol_type = other RNA
  modified_base 1: mod_base = OTHER; note = 5'-vinyl-phosphonate-2'-O-methyluridine with phosphorothioate linkage
  modified_base 2: mod_base = OTHER; note = 2'-fluoroguanosine with phosphorothioate linkage
  modified_base 3: mod_base = OTHER; note = 2'-O-methylcytidine
  modified_base 4: mod_base = OTHER; note = 2'-O-methylcytidine
  modified_base 5: mod_base = OTHER; note = 2'-O-methylguanosine
  modified_base 6: mod_base = OTHER; note = 2'-fluorouridine
  modified_base 7: mod_base = OTHER; note = 2'-O-methylcytidine
  modified_base 8: mod_base = OTHER; note = 2'-fluorouridine
  modified_base 9: mod_base = OTHER; note = 2'-fluoroadenosine
  modified_base 10: mod_base = OTHER; note = 2'-O-methylcytidine
  modified_base 11: mod_base = OTHER; note = 2'-O-methylcytidine
  modified_base 12: mod_base = OTHER; note = 2'-O-methylguanosine
  modified_base 13: mod_base = OTHER; note = 2'-O-methylcytidine
  modified_base 14: mod_base = OTHER; note = 2'-fluorocytidine
  modified_base 15: mod_base = OTHER; note = 2'-O-methyladenosine
  modified_base 16: mod_base = OTHER; note = 2'-fluorocytidine
  modified_base 17: mod_base = OTHER; note = 2'-O-methylcytidine
  modified_base 18: mod_base = OTHER; note = 2'-O-methyluridine
  modified_base 19: mod_base = OTHER; note = 2'-O-methylguanosine
  modified_base 20: mod_base = OTHER; note = 2'-O-methyluridine
  modified_base 21: mod_base = OTHER; note = 2'-O-methylguanosine with phosphorothioate linkage
  modified_base 22: mod_base = OTHER; note = 2'-O-methylguanosine with phosphorothioate linkage
  modified_base 23: mod_base = OTHER; note = 2'-O-methyladenosine
tgccgtctaccgccacctgtgga

SEQ ID NO: 938 - RNA, 23 nt, synthetic construct
  source 1..23: mol_type = other RNA
  modified_base 1: mod_base = OTHER; note = 5'-vinyl-phosphonate-2'-O-methyluridine with phosphorothioate linkage
  modified_base 2: mod_base = OTHER; note = 2'-fluorocytidine with phosphorothioate linkage
  modified_base 3: mod_base = OTHER; note = 2'-O-methylguanosine
  modified_base 4: mod_base = OTHER; note = 2'-O-methylguanosine
  modified_base 5: mod_base = OTHER; note = 2'-O-methylcytidine
  modified_base 6: mod_base = OTHER; note = 2'-fluorocytidine
  modified_base 7: mod_base = OTHER; note = 2'-O-methylguanosine
  modified_base 8: mod_base = OTHER; note = 2'-fluorocytidine
  modified_base 9: mod_base = OTHER; note = 2'-fluorocytidine
  modified_base 10: mod_base = OTHER; note = 2'-O-methylguanosine
  modified_base 11: mod_base = OTHER; note = 2'-O-methyluridine
  modified_base 12: mod_base = OTHER; note = 2'-O-methylcytidine
  modified_base 13: mod_base = OTHER; note = 2'-O-methyluridine
  modified_base 14: mod_base = OTHER; note = 2'-fluoroadenosine
  modified_base 15: mod_base = OTHER; note = 2'-O-methylcytidine
  modified_base 16: mod_base = OTHER; note = 2'-fluorocytidine
  modified_base 17: mod_base = OTHER; note = 2'-O-methylguanosine
  modified_base 18: mod_base = OTHER; note = 2'-O-methylcytidine
  modified_base 19: mod_base = OTHER; note = 2'-O-methylcytidine
  modified_base 20: mod_base = OTHER; note = 2'-O-methyladenosine
  modified_base 21: mod_base = OTHER; note = 2'-O-methylcytidine with phosphorothioate linkage
  modified_base 22: mod_base = OTHER; note = 2'-O-methylcytidine with phosphorothioate linkage
  modified_base 23: mod_base = OTHER; note = 2'-O-methyluridine
tcggccgccgtctaccgccacct

SEQ ID NO: 939 - RNA, 23 nt, synthetic construct
  source 1..23: mol_type = other RNA
  modified_base 1: mod_base = OTHER; note = 5'-vinyl-phosphonate-2'-O-methyluridine with phosphorothioate linkage
  modified_base 2: mod_base = OTHER; note = 2'-fluoroguanosine with phosphorothioate linkage
  modified_base 3: mod_base = OTHER; note = 2'-O-methyluridine
  modified_base 4: mod_base = OTHER; note = 2'-O-methyluridine
  modified_base 5: mod_base = OTHER; note = 2'-O-methylguanosine
  modified_base 6: mod_base = OTHER; note = 2'-fluorocytidine
  modified_base 7: mod_base = OTHER; note = 2'-O-methyluridine
  modified_base 8: mod_base = OTHER; note = 2'-fluorocytidine
  modified_base 9: mod_base = OTHER; note = 2'-fluoroguanosine
  modified_base 10: mod_base = OTHER; note = 2'-O-methylcytidine
  modified_base 11: mod_base = OTHER; note = 2'-O-methylcytidine
  modified_base 12: mod_base = OTHER; note = 2'-O-methylguanosine
  modified_base 13: mod_base = OTHER; note = 2'-O-methyluridine
  modified_base 14: mod_base = OTHER; note = 2'-fluorocytidine
  modified_base 15: mod_base = OTHER; note = 2'-O-methylcytidine
  modified_base 16: mod_base = OTHER; note = 2'-fluorocytidine
  modified_base 17: mod_base = OTHER; note = 2'-O-methylguanosine
  modified_base 18: mod_base = OTHER; note = 2'-O-methylguanosine
  modified_base 19: mod_base = OTHER; note = 2'-O-methylcytidine
  modified_base 20: mod_base = OTHER; note = 2'-O-methylcytidine
  modified_base 21: mod_base = OTHER; note = 2'-O-methylguanosine with phosphorothioate linkage
  modified_base 22: mod_base = OTHER; note = 2'-O-methylcytidine with phosphorothioate linkage
  modified_base 23: mod_base = OTHER; note = 2'-O-methylcytidine
tgttgctcgccgtcccggccgcc

SEQ ID NO: 940 - RNA, 23 nt, synthetic construct
  source 1..23: mol_type = other RNA
  modified_base 1: mod_base = OTHER; note = 5'-vinyl-phosphonate-2'-O-methyluridine with phosphorothioate linkage
  modified_base 2: mod_base = OTHER; note = 2'-fluorouridine with phosphorothioate linkage
  modified_base 3: mod_base = OTHER; note = 2'-O-methylguanosine
  modified_base 4: mod_base = OTHER; note = 2'-O-methyluridine
  modified_base 5: mod_base = OTHER; note = 2'-O-methyluridine
  modified_base 6: mod_base = OTHER; note = 2'-fluoroguanosine
  modified_base 7: mod_base = OTHER; note = 2'-O-methylcytidine
  modified_base 8: mod_base = OTHER; note = 2'-fluorouridine
  modified_base 9: mod_base = OTHER; note = 2'-fluorocytidine
  modified_base 10: mod_base = OTHER; note = 2'-O-methylguanosine
  modified_base 11: mod_base = OTHER; note = 2'-O-methylcytidine
  modified_base 12: mod_base = OTHER; note = 2'-O-methylcytidine
  modified_base 13: mod_base = OTHER; note = 2'-O-methylguanosine
  modified_base 14: mod_base = OTHER; note = 2'-fluorouridine
  modified_base 15: mod_base = OTHER; note = 2'-O-methylcytidine
  modified_base 16: mod_base = OTHER; note = 2'-fluorocytidine
  modified_base 17: mod_base = OTHER; note = 2'-O-methylcytidine
  modified_base 18: mod_base = OTHER; note = 2'-O-methylguanosine
  modified_base 19: mod_base = OTHER; note = 2'-O-methylguanosine
  modified_base 20: mod_base = OTHER; note = 2'-O-methylcytidine
  modified_base 21: mod_base = OTHER; note = 2'-O-methylcytidine with phosphorothioate linkage
  modified_base 22: mod_base = OTHER; note = 2'-O-methylguanosine with phosphorothioate linkage
  modified_base 23: mod_base = OTHER; note = 2'-O-methylcytidine
ttgttgctcgccgtcccggccgc

SEQ ID NO: 941 - RNA, 23 nt, synthetic construct
  source 1..23: mol_type = other RNA
  modified_base 1: mod_base = OTHER; note = 5'-vinyl-phosphonate-2'-O-methyluridine with phosphorothioate linkage
  modified_base 2: mod_base = OTHER; note = 2'-fluoroguanosine with phosphorothioate linkage
  modified_base 3: mod_base = OTHER; note = 2'-O-methylcytidine
  modified_base 4: mod_base = OTHER; note = 2'-O-methylguanosine
  modified_base 5: mod_base = OTHER; note = 2'-O-methylcytidine
  modified_base 6: mod_base = OTHER; note = 2'-fluorouridine
  modified_base 7: mod_base = OTHER; note = 2'-O-methylcytidine
  modified_base 8: mod_base = OTHER; note = 2'-fluoroadenosine
  modified_base 9: mod_base = OTHER; note = 2'-fluoroguanosine
  modified_base 10: mod_base = OTHER; note = 2'-O-methylcytidine
  modified_base 11: mod_base = OTHER; note = 2'-O-methyladenosine
  modified_base 12: mod_base = OTHER; note = 2'-O-methyluridine
  modified_base 13: mod_base = OTHER; note = 2'-O-methylguanosine
  modified_base 14: mod_base = OTHER; note = 2'-fluorouridine
  modified_base 15: mod_base = OTHER; note = 2'-O-methyladenosine
  modified_base 16: mod_base = OTHER; note = 2'-fluorocytidine
  modified_base 17: mod_base = OTHER; note = 2'-O-methylguanosine
  modified_base 18: mod_base = OTHER; note = 2'-O-methylcytidine
  modified_base 19: mod_base = OTHER; note = 2'-O-methylcytidine
  modified_base 20: mod_base = OTHER; note = 2'-O-methyladenosine
  modified_base 21: mod_base = OTHER; note = 2'-O-methylguanosine with phosphorothioate linkage
  modified_base 22: mod_base = OTHER; note = 2'-O-methylcytidine with phosphorothioate linkage
  modified_base 23: mod_base = OTHER; note = 2'-O-methylguanosine
tgcgctcagcatgtacgccagcg

SEQ ID NO: 942 - RNA, 23 nt, synthetic construct
  source 1..23: mol_type = other RNA
  modified_base 1: mod_base = OTHER; note = 5'-vinyl-phosphonate-2'-O-methyluridine with phosphorothioate linkage
  modified_base 2: mod_base = OTHER; note = 2'-fluorocytidine with phosphorothioate linkage
  modified_base 3: mod_base = OTHER; note = 2'-O-methylguanosine
  modified_base 4: mod_base = OTHER; note = 2'-O-methylcytidine
  modified_base 5: mod_base = OTHER; note = 2'-O-methylguanosine
  modified_base 6: mod_base = OTHER; note = 2'-fluorocytidine
  modified_base 7: mod_base = OTHER; note = 2'-O-methyluridine
  modified_base 8: mod_base = OTHER; note = 2'-fluorocytidine
  modified_base 9: mod_base = OTHER; note = 2'-fluoroadenosine
  modified_base 10: mod_base = OTHER; note = 2'-O-methylguanosine
  modified_base 11: mod_base = OTHER; note = 2'-O-methylcytidine
  modified_base 12: mod_base = OTHER; note = 2'-O-methyladenosine
  modified_base 13: mod_base = OTHER; note = 2'-O-methyluridine
  modified_base 14: mod_base = OTHER; note = 2'-fluoroguanosine
  modified_base 15: mod_base = OTHER; note = 2'-O-methyluridine
  modified_base 16: mod_base = OTHER; note = 2'-fluoroadenosine
  modified_base 17: mod_base = OTHER; note = 2'-O-methylcytidine
  modified_base 18: mod_base = OTHER; note = 2'-O-methylguanosine
  modified_base 19: mod_base = OTHER; note = 2'-O-methylcytidine
  modified_base 20: mod_base = OTHER; note = 2'-O-methylcytidine
  modified_base 21: mod_base = OTHER; note = 2'-O-methyladenosine with phosphorothioate linkage
  modified_base 22: mod_base = OTHER; note = 2'-O-methylguanosine with phosphorothioate linkage
  modified_base 23: mod_base = OTHER; note = 2'-O-methylcytidine
tcgcgctcagcatgtacgccagc

SEQ ID NO: 943 - RNA, 23 nt, synthetic construct
  source 1..23: mol_type = other RNA
  modified_base 1: mod_base = OTHER; note = 5'-vinyl-phosphonate-2'-O-methyluridine with phosphorothioate linkage
  modified_base 2: mod_base = OTHER; note = 2'-fluoroguanosine with phosphorothioate linkage
  modified_base 3: mod_base = OTHER; note = 2'-O-methylcytidine
  modified_base 4: mod_base = OTHER; note = 2'-O-methylguanosine
  modified_base 5: mod_base = OTHER; note = 2'-O-methylcytidine
  modified_base 6: mod_base = OTHER; note = 2'-fluoroguanosine
  modified_base 7: mod_base = OTHER; note = 2'-O-methylcytidine
  modified_base 8: mod_base = OTHER; note = 2'-fluorouridine
  modified_base 9: mod_base = OTHER; note = 2'-fluorocytidine
  modified_base 10: mod_base = OTHER; note = 2'-O-methyladenosine
  modified_base 11: mod_base = OTHER; note = 2'-O-methylguanosine
  modified_base 12: mod_base = OTHER; note = 2'-O-methylcytidine
  modified_base 13: mod_base = OTHER; note = 2'-O-methyladenosine
  modified_base 14: mod_base = OTHER; note = 2'-fluorouridine
  modified_base 15: mod_base = OTHER; note = 2'-O-methylguanosine
  modified_base 16: mod_base = OTHER; note = 2'-fluorouridine
  modified_base 17: mod_base = OTHER; note = 2'-O-methyladenosine
  modified_base 18: mod_base = OTHER; note = 2'-O-methylcytidine
  modified_base 19: mod_base = OTHER; note = 2'-O-methylguanosine
  modified_base 20: mod_base = OTHER; note = 2'-O-methylcytidine
  modified_base 21: mod_base = OTHER; note = 2'-O-methylcytidine with phosphorothioate linkage
  modified_base 22: mod_base = OTHER; note = 2'-O-methyladenosine with phosphorothioate linkage
  modified_base 23: mod_base = OTHER; note = 2'-O-methylguanosine
tgcgcgctcagcatgtacgccag

SEQ ID NO: 944 - RNA, 23 nt, synthetic construct
  source 1..23: mol_type = other RNA
  modified_base 1: mod_base = OTHER; note = 5'-vinyl-phosphonate-2'-O-methyluridine with phosphorothioate linkage
  modified_base 2: mod_base = OTHER; note = 2'-fluorouridine with phosphorothioate linkage
  modified_base 3: mod_base = OTHER; note = 2'-O-methylguanosine
  modified_base 4: mod_base = OTHER; note = 2'-O-methylcytidine
  modified_base 5: mod_base = OTHER; note = 2'-O-methylguanosine
  modified_base 6: mod_base = OTHER; note = 2'-fluorocytidine
  modified_base 7: mod_base = OTHER; note = 2'-O-methylguanosine
  modified_base 8: mod_base = OTHER; note = 2'-fluorocytidine
  modified_base 9: mod_base = OTHER; note = 2'-fluorouridine
  modified_base 10: mod_base = OTHER; note = 2'-O-methylcytidine
  modified_base 11: mod_base = OTHER; note = 2'-O-methyladenosine
  modified_base 12: mod_base = OTHER; note = 2'-O-methylguanosine
  modified_base 13: mod_base = OTHER; note = 2'-O-methylcytidine
  modified_base 14: mod_base = OTHER; note = 2'-fluoroadenosine
  modified_base 15: mod_base = OTHER; note = 2'-O-methyluridine
  modified_base 16: mod_base = OTHER; note = 2'-fluoroguanosine
  modified_base 17: mod_base = OTHER; note = 2'-O-methyluridine
  modified_base 18: mod_base = OTHER; note = 2'-O-methyladenosine
  modified_base 19: mod_base = OTHER; note = 2'-O-methylcytidine
  modified_base 20: mod_base = OTHER; note = 2'-O-methylguanosine
  modified_base 21: mod_base = OTHER; note = 2'-O-methylcytidine with phosphorothioate linkage
  modified_base 22: mod_base = OTHER; note = 2'-O-methylcytidine with phosphorothioate linkage
  modified_base 23: mod_base = OTHER; note = 2'-O-methyladenosine
ttgcgcgctcagcatgtacgcca

SEQ ID NO: 945 - RNA, 23 nt, synthetic construct
  source 1..23: mol_type = other RNA
  modified_base 1: mod_base = OTHER; note = 5'-vinyl-phosphonate-2'-O-methyluridine with phosphorothioate linkage
  modified_base 2: mod_base = OTHER; note = 2'-fluoroadenosine with phosphorothioate linkage
  modified_base 3: mod_base = OTHER; note = 2'-O-methylcytidine
  modified_base 4: mod_base = OTHER; note = 2'-O-methyluridine
  modified_base 5: mod_base = OTHER; note = 2'-O-methyladenosine
  modified_base 6: mod_base = OTHER; note = 2'-fluorocytidine
  modified_base 7: mod_base = OTHER; note = 2'-O-methylguanosine
  modified_base 8: mod_base = OTHER; note = 2'-fluorouridine
  modified_base 9: mod_base = OTHER; note = 2'-fluoroguanosine
  modified_base 10: mod_base = OTHER; note = 2'-O-methyluridine
  modified_base 11: mod_base = OTHER; note = 2'-O-methylguanosine
  modified_base 12: mod_base = OTHER; note = 2'-O-methylcytidine
  modified_base 13: mod_base = OTHER; note = 2'-O-methylguanosine
  modified_base 14: mod_base = OTHER; note = 2'-fluorocytidine
  modified_base 15: mod_base = OTHER; note = 2'-O-methylguanosine
  modified_base 16: mod_base = OTHER; note = 2'-fluorocytidine
  modified_base 17: mod_base = OTHER; note = 2'-O-methyluridine
  modified_base 18: mod_base = OTHER; note = 2'-O-methylcytidine
  modified_base 19: mod_base = OTHER; note = 2'-O-methyladenosine
  modified_base 20: mod_base = OTHER; note = 2'-O-methylguanosine
  modified_base 21: mod_base = OTHER; note = 2'-O-methylcytidine with phosphorothioate linkage
  modified_base 22: mod_base = OTHER; note = 2'-O-methyladenosine with phosphorothioate linkage
  modified_base 23: mod_base = OTHER; note = 2'-O-methyluridine
tactacgtgtgcgcgctcagcat

SEQ ID NO: 946 - RNA, 23 nt, synthetic construct
  source 1..23: mol_type = other RNA
  modified_base 1: mod_base = OTHER; note = 5'-vinyl-phosphonate-2'-O-methyluridine with phosphorothioate linkage
  modified_base 2: mod_base = OTHER; note = 2'-fluorouridine with phosphorothioate linkage
  modified_base 3: mod_base = OTHER; note = 2'-O-methyladenosine
  modified_base 4: mod_base = OTHER; note = 2'-O-methylcytidine
  modified_base 5: mod_base = OTHER; note = 2'-O-methyluridine
  modified_base 6: mod_base = OTHER; note = 2'-fluoroadenosine
  modified_base 7: mod_base = OTHER; note = 2'-O-methylcytidine
  modified_base 8: mod_base = OTHER; note = 2'-fluoroguanosine
  modified_base 9: mod_base = OTHER; note = 2'-fluorouridine
  modified_base 10: mod_base = OTHER; note = 2'-O-methylguanosine
  modified_base 11: mod_base = OTHER; note = 2'-O-methyluridine
  modified_base 12: mod_base = OTHER; note = 2'-O-methylguanosine
  modified_base 13: mod_base = OTHER; note = 2'-O-methylcytidine
  modified_base 14: mod_base = OTHER; note = 2'-fluoroguanosine
  modified_base 15: mod_base = OTHER; note = 2'-O-methylcytidine
  modified_base 16: mod_base = OTHER; note = 2'-fluoroguanosine
  modified_base 17: mod_base = OTHER; note = 2'-O-methylcytidine
  modified_base 18: mod_base = OTHER; note = 2'-O-methyluridine
  modified_base 19: mod_base = OTHER; note = 2'-O-methylcytidine
  modified_base 20: mod_base = OTHER; note = 2'-O-methyladenosine
  modified_base 21: mod_base = OTHER; note = 2'-O-methylguanosine with phosphorothioate linkage
  modified_base 22: mod_base = OTHER; note = 2'-O-methylcytidine with phosphorothioate linkage
  modified_base 23: mod_base = OTHER; note = 2'-O-methyladenosine
ttactacgtgtgcgcgctcagca

SEQ ID NO: 947 - RNA, 23 nt, synthetic construct
  source 1..23: mol_type = other RNA
  modified_base 1: mod_base = OTHER; note = 5'-vinyl-phosphonate-2'-O-methyluridine with phosphorothioate linkage
  modified_base 2: mod_base = OTHER; note = 2'-fluorouridine with phosphorothioate linkage
  modified_base 3: mod_base = OTHER; note = 2'-O-methylguanosine
  modified_base 4: mod_base = OTHER; note = 2'-O-methyluridine
  modified_base 5: mod_base = OTHER; note = 2'-O-methyladenosine
  modified_base 6: mod_base = OTHER; note = 2'-fluorocytidine
  modified_base 7: mod_base = OTHER; note = 2'-O-methyluridine
  modified_base 8: mod_base = OTHER; note = 2'-fluoroadenosine
  modified_base 9: mod_base = OTHER; note = 2'-fluorocytidine
  modified_base 10: mod_base = OTHER; note = 2'-O-methylguanosine
  modified_base 11: mod_base = OTHER; note = 2'-O-methyluridine
  modified_base 12: mod_base = OTHER; note = 2'-O-methylguanosine
  modified_base 13: mod_base = OTHER; note = 2'-O-methyluridine
  modified_base 14: mod_base = OTHER; note = 2'-fluoroguanosine
  modified_base 15: mod_base = OTHER; note = 2'-O-methylcytidine
  modified_base 16: mod_base = OTHER; note = 2'-fluoroguanosine
  modified_base 17: mod_base = OTHER; note = 2'-O-methylcytidine
  modified_base 18: mod_base = OTHER; note = 2'-O-methylguanosine
  modified_base 19: mod_base = OTHER; note = 2'-O-methylcytidine
  modified_base 20: mod_base = OTHER; note = 2'-O-methyluridine
  modified_base 21: mod_base = OTHER; note = 2'-O-methylcytidine with phosphorothioate linkage
  modified_base 22: mod_base = OTHER; note = 2'-O-methyladenosine with phosphorothioate linkage
  modified_base 23: mod_base = OTHER; note = 2'-O-methylguanosine
ttgtactacgtgtgcgcgctcag

SEQ ID NO: 948 - RNA, 23 nt, synthetic construct
  source 1..23: mol_type = other RNA
  modified_base 1: mod_base = OTHER; note = 5'-vinyl-phosphonate-2'-O-methyluridine with phosphorothioate linkage
  modified_base 2: mod_base = OTHER; note = 2'-fluorocytidine with phosphorothioate linkage
  modified_base 3: mod_base = OTHER; note = 2'-O-methylguanosine
  modified_base 4: mod_base = OTHER; note = 2'-O-methylguanosine
  modified_base 5: mod_base = OTHER; note = 2'-O-methyluridine
  modified_base 6: mod_base = OTHER; note = 2'-fluoroguanosine
  modified_base 7: mod_base = OTHER; note = 2'-O-methyluridine
  modified_base 8: mod_base = OTHER; note = 2'-fluoroadenosine
  modified_base 9: mod_base = OTHER; note = 2'-fluorocytidine
  modified_base 10: mod_base = OTHER; note = 2'-O-methyluridine
  modified_base 11: mod_base = OTHER; note = 2'-O-methyladenosine
  modified_base 12: mod_base = OTHER; note = 2'-O-methylcytidine
  modified_base 13: mod_base = OTHER; note = 2'-O-methylguanosine
  modified_base 14: mod_base = OTHER; note = 2'-fluorouridine
  modified_base 15: mod_base = OTHER; note = 2'-O-methylguanosine
  modified_base 16: mod_base = OTHER; note = 2'-fluorouridine
  modified_base 17: mod_base = OTHER; note = 2'-O-methylguanosine
  modified_base 18: mod_base = OTHER; note = 2'-O-methylcytidine
  modified_base 19: mod_base = OTHER; note = 2'-O-methylguanosine
  modified_base 20: mod_base = OTHER; note = 2'-O-methylcytidine
  modified_base 21: mod_base = OTHER; note = 2'-O-methylguanosine with phosphorothioate linkage
  modified_base 22: mod_base = OTHER; note = 2'-O-methylcytidine with phosphorothioate linkage
  modified_base 23: mod_base = OTHER; note = 2'-O-methyluridine
tcggtgtactacgtgtgcgcgct

SEQ ID NO: 949 - RNA, 23 nt, synthetic construct
  source 1..23: mol_type = other RNA
  modified_base 1: mod_base = OTHER; note = 5'-vinyl-phosphonate-2'-O-methyluridine with phosphorothioate linkage
  modified_base 2: mod_base = OTHER; note = 2'-fluoroguanosine with phosphorothioate linkage
  modified_base 3: mod_base = OTHER; note = 2'-O-methylcytidine
  modified_base 4: mod_base = OTHER; note = 2'-O-methylguanosine
  modified_base 5: mod_base = OTHER; note = 2'-O-methylguanosine
  modified_base 6: mod_base = OTHER; note = 2'-fluorouridine
  modified_base 7: mod_base = OTHER; note = 2'-O-methylguanosine
  modified_base 8: mod_base = OTHER; note = 2'-fluorouridine
  modified_base 9: mod_base = OTHER; note = 2'-fluoroadenosine
  modified_base 10: mod_base = OTHER; note = 2'-O-methylcytidine
  modified_base 11: mod_base = OTHER; note = 2'-O-methyluridine
  modified_base 12: mod_base = OTHER; note = 2'-O-methyladenosine
  modified_base 13: mod_base = OTHER; note = 2'-O-methylcytidine
  modified_base 14: mod_base = OTHER; note = 2'-fluoroguanosine
  modified_base 15: mod_base = OTHER; note = 2'-O-methyluridine
  modified_base 16: mod_base = OTHER; note = 2'-fluoroguanosine
  modified_base 17: mod_base = OTHER; note = 2'-O-methyluridine
  modified_base 18: mod_base = OTHER; note = 2'-O-methylguanosine
  modified_base 19: mod_base = OTHER; note = 2'-O-methylcytidine
  modified_base 20: mod_base = OTHER; note = 2'-O-methylguanosine
  modified_base 21: mod_base = OTHER; note = 2'-O-methylcytidine with phosphorothioate linkage
  modified_base 22: mod_base = OTHER; note = 2'-O-methylguanosine with phosphorothioate linkage
  modified_base 23: mod_base = OTHER; note = 2'-O-methylcytidine
tgcggtgtactacgtgtgcgcgc

SEQ ID NO: 950 - RNA, 23 nt, synthetic construct
  source 1..23: mol_type = other RNA
  modified_base 1: mod_base = OTHER; note = 5'-vinyl-phosphonate-2'-O-methyluridine with phosphorothioate linkage
  modified_base 2: mod_base = OTHER; note = 2'-fluoroguanosine with phosphorothioate linkage
  modified_base 3: mod_base = OTHER; note = 2'-O-methylguanosine
  modified_base 4: mod_base = OTHER; note = 2'-O-methylcytidine
  modified_base 5: mod_base = OTHER; note = 2'-O-methylguanosine
  modified_base 6: mod_base = OTHER; note = 2'-fluoroguanosine
  modified_base 7: mod_base = OTHER; note = 2'-O-methyluridine
  modified_base 8: mod_base = OTHER; note = 2'-fluoroguanosine
  modified_base 9: mod_base = OTHER; note = 2'-fluorouridine
  modified_base 10: mod_base = OTHER; note = 2'-O-methyladenosine
  modified_base 11: mod_base = OTHER; note = 2'-O-methylcytidine
  modified_base 12: mod_base = OTHER; note = 2'-O-methyluridine
  modified_base 13: mod_base = OTHER; note = 2'-O-methyladenosine
  modified_base 14: mod_base = OTHER; note = 2'-fluorocytidine
  modified_base 15: mod_base = OTHER; note = 2'-O-methylguanosine
  modified_base 16: mod_base = OTHER; note = 2'-fluorouridine
  modified_base 17: mod_base = OTHER; note = 2'-O-methylguanosine
  modified_base 18: mod_base = OTHER; note = 2'-O-methyluridine
  modified_base 19: mod_base = OTHER; note = 2'-O-methylguanosine
  modified_base 20: mod_base = OTHER; note = 2'-O-methylcytidine
  modified_base 21: mod_base = OTHER; note = 2'-O-methylguanosine with phosphorothioate linkage
  modified_base 22: mod_base = OTHER; note = 2'-O-methylcytidine with phosphorothioate linkage
  modified_base 23: mod_base = OTHER; note = 2'-O-methylguanosine
tggcggtgtactacgtgtgcgcg

SEQ ID NO: 951 - RNA, 23 nt, synthetic construct
  source 1..23: mol_type = other RNA
  modified_base 1: mod_base = OTHER; note = 5'-vinyl-phosphonate-2'-O-methyluridine with phosphorothioate linkage
  modified_base 2: mod_base = OTHER; note = 2'-fluoroadenosine with phosphorothioate linkage
  modified_base 3: mod_base = OTHER; note = 2'-O-methylguanosine
  modified_base 4: mod_base = OTHER; note = 2'-O-methylguanosine
  modified_base 5: mod_base = OTHER; note = 2'-O-methylcytidine
  modified_base 6: mod_base = OTHER; note = 2'-fluoroguanosine
  modified_base 7: mod_base = OTHER; note = 2'-O-methylguanosine
  modified_base 8: mod_base = OTHER; note = 2'-fluorouridine
  modified_base 9: mod_base = OTHER; note = 2'-fluoroguanosine
  modified_base 10: mod_base = OTHER; note = 2'-O-methyluridine
  modified_base 11: mod_base = OTHER; note = 2'-O-methyladenosine
  modified_base 12: mod_base = OTHER; note = 2'-O-methylcytidine
  modified_base 13: mod_base = OTHER; note = 2'-O-methyluridine
  modified_base 14: mod_base = OTHER; note = 2'-fluoroadenosine
  modified_base 15: mod_base = OTHER; note = 2'-O-methylcytidine
  modified_base 16: mod_base = OTHER; note = 2'-fluoroguanosine
  modified_base 17: mod_base = OTHER; note = 2'-O-methyluridine
  modified_base 18: mod_base = OTHER; note = 2'-O-methylguanosine
  modified_base 19: mod_base = OTHER; note = 2'-O-methyluridine
  modified_base 20: mod_base = OTHER; note = 2'-O-methylguanosine
  modified_base 21: mod_base = OTHER; note = 2'-O-methylcytidine with phosphorothioate linkage
  modified_base 22: mod_base = OTHER; note = 2'-O-methylguanosine with phosphorothioate linkage
  modified_base 23: mod_base = OTHER; note = 2'-O-methylcytidine
taggcggtgtactacgtgtgcgc

SEQ ID NO: 952 - RNA, 23 nt, synthetic construct
  source 1..23: mol_type = other RNA
  modified_base 1: mod_base = OTHER; note = 5'-vinyl-phosphonate-2'-O-methyluridine with phosphorothioate linkage
  modified_base 2: mod_base = OTHER; note = 2'-fluoroadenosine with phosphorothioate linkage
  modified_base 3: mod_base = OTHER; note = 2'-O-methyladenosine
  modified_base 4: mod_base = OTHER; note = 2'-O-methylguanosine
  modified_base 5: mod_base = OTHER; note = 2'-O-methylguanosine
  modified_base 6: mod_base = OTHER; note = 2'-fluorocytidine
  modified_base 7: mod_base = OTHER; note = 2'-O-methylguanosine
  modified_base 8: mod_base = OTHER; note = 2'-fluoroguanosine
  modified_base 9: mod_base = OTHER; note = 2'-fluorouridine
  modified_base 10: mod_base = OTHER; note = 2'-O-methylguanosine
  modified_base 11: mod_base = OTHER; note = 2'-O-methyluridine
  modified_base 12: mod_base = OTHER; note = 2'-O-methyladenosine
  modified_base 13: mod_base = OTHER; note = 2'-O-methylcytidine
  modified_base 14: mod_base = OTHER; note = 2'-fluorouridine
  modified_base 15: mod_base = OTHER; note = 2'-O-methyladenosine
  modified_base 16: mod_base = OTHER; note = 2'-fluorocytidine
  modified_base 17: mod_base = OTHER; note = 2'-O-methylguanosine
  modified_base 18: mod_base = OTHER; note = 2'-O-methyluridine
  modified_base 19: mod_base = OTHER; note = 2'-O-methylguanosine
  modified_base 20: mod_base = OTHER; note = 2'-O-methyluridine
  modified_base 21: mod_base = OTHER; note = 2'-O-methylguanosine with phosphorothioate linkage
  modified_base 22: mod_base = OTHER; note = 2'-O-methylcytidine with phosphorothioate linkage
  modified_base 23: mod_base = OTHER; note = 2'-O-methylguanosine
taaggcggtgtactacgtgtgcg

SEQ ID NO: 953 - RNA, 23 nt, synthetic construct
  source 1..23: mol_type = other RNA
  modified_base 1: mod_base = OTHER; note = 5'-vinyl-phosphonate-2'-O-methyluridine with phosphorothioate linkage
  modified_base 2: mod_base = OTHER; note = 2'-fluorocytidine with phosphorothioate linkage
  modified_base 3: mod_base = OTHER; note = 2'-O-methyladenosine
  modified_base 4: mod_base = OTHER; note = 2'-O-methyladenosine
  modified_base 5: mod_base = OTHER; note = 2'-O-methylguanosine
  modified_base 6: mod_base = OTHER; note = 2'-fluoroguanosine
  modified_base 7: mod_base = OTHER; note = 2'-O-methylcytidine
  modified_base 8: mod_base = OTHER; note = 2'-fluoroguanosine
  modified_base 9: mod_base = OTHER; note = 2'-fluoroguanosine
  modified_base 10: mod_base = OTHER; note = 2'-O-methyluridine
  modified_base 11: mod_base = OTHER; note = 2'-O-methylguanosine
  modified_base 12: mod_base = OTHER; note = 2'-O-methyluridine
  modified_base 13: mod_base = OTHER; note = 2'-O-methyladenosine
  modified_base 14: mod_base = OTHER; note = 2'-fluorocytidine
  modified_base 15: mod_base = OTHER; note = 2'-O-methyluridine
  modified_base 16: mod_base = OTHER; note = 2'-fluoroadenosine
  modified_base 17: mod_base = OTHER; note = 2'-O-methylcytidine
  modified_base 18: mod_base = OTHER; note = 2'-O-methylguanosine
  modified_base 19: mod_base = OTHER; note = 2'-O-methyluridine
  modified_base 20: mod_base = OTHER; note = 2'-O-methylguanosine
  modified_base 21: mod_base = OTHER; note = 2'-O-methyluridine with phosphorothioate linkage
  modified_base 22: mod_base = OTHER; note = 2'-O-methylguanosine with phosphorothioate linkage
  modified_base 23: mod_base = OTHER; note = 2'-O-methylcytidine
tcaaggcggtgtactacgtgtgc

SEQ ID NO: 954 - RNA, 23 nt, synthetic construct
  source 1..23: mol_type = other RNA
  modified_base 1: mod_base = OTHER; note = 5'-vinyl-phosphonate-2'-O-methyluridine with phosphorothioate linkage
  modified_base 2: mod_base = OTHER; note = 2'-fluorouridine with phosphorothioate linkage
  modified_base 3: mod_base = OTHER; note = 2'-O-methylguanosine
  modified_base 4: mod_base = OTHER; note = 2'-O-methylcytidine
  modified_base 5: mod_base = OTHER; note = 2'-O-methyladenosine
  modified_base 6: mod_base = OTHER; note = 2'-fluoroadenosine
  modified_base 7: mod_base = OTHER; note = 2'-O-methylguanosine
  modified_base 8: mod_base = OTHER; note = 2'-fluoroguanosine
  modified_base 9: mod_base = OTHER; note = 2'-fluorocytidine
  modified_base 10: mod_base = OTHER; note = 2'-O-methylguanosine
  modified_base 11: mod_base = OTHER; note = 2'-O-methylguanosine
  modified_base 12: mod_base = OTHER; note = 2'-O-methyluridine
  modified_base 13: mod_base = OTHER; note = 2'-O-methylguanosine
  modified_base 14: mod_base = OTHER; note = 2'-fluorouridine
  modified_base 15: mod_base = OTHER; note = 2'-O-methyladenosine
  modified_base 16: mod_base = OTHER; note = 2'-fluorocytidine
  modified_base 17: mod_base = OTHER; note = 2'-O-methyluridine
  modified_base 18: mod_base = OTHER; note = 2'-O-methyladenosine
  modified_base 19: mod_base = OTHER; note = 2'-O-methylcytidine
  modified_base 20: mod_base = OTHER; note = 2'-O-methylguanosine
  modified_base 21: mod_base = OTHER; note = 2'-O-methyluridine with phosphorothioate linkage
  modified_base 22: mod_base = OTHER; note = 2'-O-methylguanosine with phosphorothioate linkage
  modified_base 23: mod_base = OTHER; note = 2'-O-methyluridine
ttgcaaggcggtgtactacgtgt

SEQ ID NO: 955 - RNA, 23 nt, synthetic construct
  source 1..23: mol_type = other RNA
  modified_base 1: mod_base = OTHER; note = 5'-vinyl-phosphonate-2'-O-methyluridine with phosphorothioate linkage
  modified_base 2: mod_base = OTHER; note = 2'-fluorocytidine with phosphorothioate linkage
  modified_base 3: mod_base = OTHER; note = 2'-O-methyluridine
  modified_base 4: mod_base = OTHER; note = 2'-O-methylguanosine
  modified_base 5: mod_base = OTHER; note = 2'-O-methylcytidine
  modified_base 6: mod_base = OTHER; note = 2'-fluoroadenosine
  modified_base 7: mod_base = OTHER; note = 2'-O-methyladenosine
  modified_base 8: mod_base = OTHER; note = 2'-fluoroguanosine
  modified_base 9: mod_base = OTHER; note = 2'-fluoroguanosine
  modified_base 10: mod_base = OTHER; note = 2'-O-methylcytidine
  modified_base 11: mod_base = OTHER; note = 2'-O-methylguanosine
  modified_base 12: mod_base = OTHER; note = 2'-O-methylguanosine
  modified_base 13: mod_base = OTHER; note = 2'-O-methyluridine
  modified_base 14: mod_base = OTHER; note = 2'-fluoroguanosine
  modified_base 15: mod_base = OTHER; note = 2'-O-methyluridine
  modified_base 16: mod_base = OTHER; note = 2'-fluoroadenosine
  modified_base 17: mod_base = OTHER; note = 2'-O-methylcytidine
  modified_base 18: mod_base = OTHER; note = 2'-O-methyluridine
  modified_base 19: mod_base = OTHER; note = 2'-O-methyladenosine
  modified_base 20: mod_base = OTHER; note = 2'-O-methylcytidine
  modified_base 21: mod_base = OTHER; note = 2'-O-methylguanosine with phosphorothioate linkage
  modified_base 22: mod_base = OTHER; note = 2'-O-methyluridine with phosphorothioate linkage
  modified_base 23: mod_base = OTHER; note = 2'-O-methylguanosine
tctgcaaggcggtgtactacgtg

SEQ ID NO: 956 - RNA, 23 nt, synthetic construct
  source 1..23: mol_type = other RNA
  modified_base 1: mod_base = OTHER; note = 5'-vinyl-phosphonate-2'-O-methyluridine with phosphorothioate linkage
  modified_base 2: mod_base = OTHER; note = 2'-fluoroguanosine with phosphorothioate linkage
  modified_base 3: mod_base = OTHER; note = 2'-O-methylcytidine
  modified_base 4: mod_base = OTHER; note = 2'-O-methyluridine
  modified_base 5: mod_base = OTHER; note = 2'-O-methylguanosine
  modified_base 6: mod_base = OTHER; note = 2'-fluorocytidine
  modified_base 7: mod_base = OTHER; note = 2'-O-methyladenosine
  modified_base 8: mod_base = OTHER; note = 2'-fluoroadenosine
  modified_base 9: mod_base = OTHER; note = 2'-fluoroguanosine
  modified_base 10: mod_base = OTHER; note = 2'-O-methylguanosine
  modified_base 11: mod_base = OTHER; note = 2'-O-methylcytidine
  modified_base 12: mod_base = OTHER; note = 2'-O-methylguanosine
  modified_base 13: mod_base = OTHER; note = 2'-O-methylguanosine
  modified_base 14: mod_base = OTHER; note = 2'-fluorouridine
  modified_base 15: mod_base = OTHER; note = 2'-O-methylguanosine
  modified_base 16: mod_base = OTHER; note = 2'-fluorouridine
  modified_base 17: mod_base = OTHER; note = 2'-O-methyladenosine
  modified_base 18: mod_base = OTHER; note = 2'-O-methylcytidine
  modified_base 19: mod_base = OTHER; note = 2'-O-methyluridine
  modified_base 20: mod_base = OTHER; note = 2'-O-methyladenosine
  modified_base 21: mod_base = OTHER; note = 2'-O-methylcytidine with phosphorothioate linkage
  modified_base 22: mod_base = OTHER; note = 2'-O-methylguanosine with phosphorothioate linkage
  modified_base 23: mod_base = OTHER; note = 2'-O-methyluridine
tgctgcaaggcggtgtactacgt

SEQ ID NO: 957 - RNA, 23 nt, synthetic construct
  source 1..23: mol_type = other RNA
  modified_base 1: mod_base = OTHER; note = 5'-vinyl-phosphonate-2'-O-methyluridine with phosphorothioate linkage
  modified_base 2: mod_base = OTHER; note = 2'-fluoroguanosine with phosphorothioate linkage
  modified_base 3: mod_base = OTHER; note = 2'-O-methylcytidine
  modified_base 4: mod_base = OTHER; note = 2'-O-methylcytidine
  modified_base 5: mod_base = OTHER; note = 2'-O-methyluridine
  modified_base 6: mod_base = OTHER; note = 2'-fluorouridine
  modified_base 7: mod_base = OTHER; note = 2'-O-methylcytidine
  modified_base 8: mod_base = OTHER; note = 2'-fluorocytidine
  modified_base 9: mod_base = OTHER; note = 2'-fluorouridine
  modified_base 10: mod_base = OTHER; note = 2'-O-methylguanosine
  modified_base 11: mod_base = OTHER; note = 2'-O-methyladenosine
  modified_base 12: mod_base = OTHER; note = 2'-O-methylcytidine
  modified_base 13: mod_base = OTHER; note = 2'-O-methylcytidine
  modified_base 14: mod_base = OTHER; note = 2'-fluorocytidine
  modified_base 15: mod_base = OTHER; note = 2'-O-methylguanosine
  modified_base 16: mod_base = OTHER; note = 2'-fluoroguanosine
  modified_base 17: mod_base = OTHER; note = 2'-O-methylcytidine
  modified_base 18: mod_base = OTHER; note = 2'-O-methyladenosine
  modified_base 19: mod_base = OTHER; note = 2'-O-methylguanosine
  modified_base 20: mod_base = OTHER; note = 2'-O-methylguanosine
  modified_base 21: mod_base = OTHER; note = 2'-O-methylcytidine with phosphorothioate linkage
  modified_base 22: mod_base = OTHER; note = 2'-O-methylcytidine with phosphorothioate linkage
  modified_base 23: mod_base = OTHER; note = 2'-O-methyluridine
tgccttcctgacccggcaggcct

SEQ ID NO: 958 - RNA, 23 nt, synthetic construct
  source 1..23: mol_type = other RNA
  modified_base 1: mod_base = OTHER; note = 5'-vinyl-phosphonate-2'-O-methyluridine with phosphorothioate linkage
  modified_base 2: mod_base = OTHER; note = 2'-fluorocytidine with phosphorothioate linkage
  modified_base 3: mod_base = OTHER; note = 2'-O-methylguanosine
  modified_base 4: mod_base = OTHER; note = 2'-O-methylcytidine
  modified_base 5: mod_base = OTHER; note = 2'-O-methyluridine
  modified_base 6: mod_base = OTHER; note = 2'-fluorocytidine
  modified_base 7: mod_base = OTHER; note = 2'-O-methyluridine
  modified_base 8: mod_base = OTHER; note = 2'-fluorouridine
  modified_base 9: mod_base = OTHER; note = 2'-fluorouridine
  modified_base 10: mod_base = OTHER; note = 2'-O-methylguanosine
  modified_base 11: mod_base = OTHER; note = 2'-O-methyluridine
  modified_base 12: mod_base = OTHER; note = 2'-O-methylguanosine
  modified_base 13: mod_base = OTHER; note = 2'-O-methylguanosine
  modified_base 14: mod_base = OTHER; note = 2'-fluorocytidine
  modified_base 15: mod_base = OTHER; note = 2'-O-methylcytidine
  modified_base 16: mod_base = OTHER; note = 2'-fluorouridine
  modified_base 17: mod_base = OTHER; note = 2'-O-methyluridine
  modified_base 18: mod_base = OTHER; note = 2'-O-methylcytidine
  modified_base 19: mod_base = OTHER; note = 2'-O-methylcytidine
  modified_base 20: mod_base = OTHER; note = 2'-O-methyluridine
  modified_base 21: mod_base = OTHER; note = 2'-O-methylguanosine with phosphorothioate linkage
  modified_base 22: mod_base = OTHER; note = 2'-O-methyladenosine with phosphorothioate linkage
  modified_base 23: mod_base = OTHER; note = 2'-O-methylcytidine
tcgctctttgtggccttcctgac

SEQ ID NO: 959 - RNA, 23 nt, synthetic construct
  source 1..23: mol_type = other RNA
  modified_base 1: mod_base = OTHER; note = 5'-vinyl-phosphonate-2'-O-methyluridine with phosphorothioate linkage
  modified_base 2: mod_base = OTHER; note = 2'-fluoroguanosine with phosphorothioate linkage
  modified_base 3: mod_base = OTHER; note = 2'-O-methylcytidine
  modified_base 4: mod_base = OTHER; note = 2'-O-methylcytidine
  modified_base 5: mod_base = OTHER; note = 2'-O-methylguanosine
  modified_base 6: mod_base = OTHER; note = 2'-fluorocytidine
  modified_base 7: mod_base = OTHER; note = 2'-O-methyluridine
  modified_base 8: mod_base = OTHER; note = 2'-fluorocytidine
  modified_base 9: mod_base = OTHER; note = 2'-fluorouridine
  modified_base 10: mod_base = OTHER; note = 2'-O-methyluridine
  modified_base 11: mod_base = OTHER; note = 2'-O-methyluridine
  modified_base 12: mod_base = OTHER; note = 2'-O-methylguanosine
  modified_base 13: mod_base = OTHER; note = 2'-O-methyluridine
  modified_base 14: mod_base = OTHER; note = 2'-fluoroguanosine
  modified_base 15: mod_base = OTHER; note = 2'-O-methylguanosine
  modified_base 16: mod_base = OTHER; note = 2'-fluorocytidine
  modified_base 17: mod_base = OTHER; note = 2'-O-methylcytidine
  modified_base 18: mod_base = OTHER; note = 2'-O-methyluridine
  modified_base 19: mod_base = OTHER; note = 2'-O-methyluridine
  modified_base 20: mod_base = OTHER; note = 2'-O-methylcytidine
  modified_base 21: mod_base = OTHER; note = 2'-O-methylcytidine with phosphorothioate linkage
  modified_base 22: mod_base = OTHER; note = 2'-O-methyluridine with phosphorothioate linkage
  modified_base 23: mod_base = OTHER; note = 2'-O-methylguanosine
tgccgctctttgtggccttcctg

SEQ ID NO: 960 - RNA, 23 nt, synthetic construct
  source 1..23: mol_type = other RNA
  modified_base 1: mod_base = OTHER; note = 5'-vinyl-phosphonate-2'-O-methyluridine with phosphorothioate linkage
  modified_base 2: mod_base = OTHER; note = 2'-fluorocytidine with phosphorothioate linkage
  modified_base 3: mod_base = OTHER; note = 2'-O-methylguanosine
  modified_base 4: mod_base = OTHER; note = 2'-O-methylcytidine
  modified_base 5: mod_base = OTHER; note = 2'-O-methylcytidine
  modified_base 6: mod_base = OTHER; note = 2'-fluoroguanosine
  modified_base 7: mod_base = OTHER; note = 2'-O-methylcytidine
  modified_base 8: mod_base = OTHER; note = 2'-fluorouridine
  modified_base 9: mod_base = OTHER; note = 2'-fluorocytidine
  modified_base 10: mod_base = OTHER; note = 2'-O-methyluridine
  modified_base 11: mod_base = OTHER; note = 2'-O-methyluridine
  modified_base 12: mod_base = OTHER; note = 2'-O-methyluridine
  modified_base 13: mod_base = OTHER; note = 2'-O-methylguanosine
  modified_base 14: mod_base = OTHER; note = 2'-fluorouridine
  modified_base 15: mod_base = OTHER; note = 2'-O-methylguanosine
  modified_base 16: mod_base = OTHER; note = 2'-fluoroguanosine
  modified_base 17: mod_base = OTHER; note = 2'-O-methylcytidine
  modified_base 18: mod_base = OTHER; note = 2'-O-methylcytidine
  modified_base 19: mod_base = OTHER; note = 2'-O-methyluridine
  modified_base 20: mod_base = OTHER; note = 2'-O-methyluridine
  modified_base 21: mod_base = OTHER; note = 2'-O-methylcytidine with phosphorothioate linkage
  modified_base 22: mod_base = OTHER; note = 2'-O-methylcytidine with phosphorothioate linkage
  modified_base 23: mod_base = OTHER; note = 2'-O-methyluridine
tcgccgctctttgtggccttcct

SEQ ID NO: 961 - RNA, 23 nt, synthetic construct
  source 1..23: mol_type = other RNA
  modified_base 1: mod_base = OTHER; note = 5'-vinyl-phosphonate-2'-O-methyluridine with phosphorothioate linkage
  modified_base 2: mod_base = OTHER; note = 2'-fluoroadenosine with phosphorothioate linkage
  modified_base 3: mod_base = OTHER; note = 2'-O-methylcytidine
  modified_base 4: mod_base = OTHER; note = 2'-O-methylguanosine
  modified_base 5: mod_base = OTHER; note = 2'-O-methylcytidine
  modified_base 6: mod_base = OTHER; note = 2'-fluorocytidine
  modified_base 7: mod_base = OTHER; note = 2'-O-methylguanosine
  modified_base 8: mod_base = OTHER; note = 2'-fluorocytidine
  modified_base 9: mod_base = OTHER; note = 2'-fluorouridine
  modified_base 10: mod_base = OTHER; note = 2'-O-methylcytidine
  modified_base 11: mod_base = OTHER; note = 2'-O-methyluridine
  modified_base 12: mod_base = OTHER; note = 2'-O-methyluridine
  modified_base 13: mod_base = OTHER; note = 2'-O-methyluridine
  modified_base 14: mod_base = OTHER; note = 2'-fluoroguanosine
  modified_base 15: mod_base = OTHER; note = 2'-O-methyluridine
  modified_base 16: mod_base = OTHER; note = 2'-fluoroguanosine
  modified_base 17: mod_base = OTHER; note = 2'-O-methylguanosine
  modified_base 18: mod_base = OTHER; note = 2'-O-methylcytidine
  modified_base 19: mod_base = OTHER; note = 2'-O-methylcytidine
  modified_base 20: mod_base = OTHER; note = 2'-O-methyluridine
  modified_base 21: mod_base = OTHER; note = 2'-O-methyluridine with phosphorothioate linkage
  modified_base 22: mod_base = OTHER; note = 2'-O-methylcytidine with phosphorothioate linkage
  modified_base 23: mod_base = OTHER; note = 2'-O-methylcytidine
tacgccgctctttgtggccttcc

SEQ ID NO: 962 - RNA, 23 nt, synthetic construct
  source 1..23: mol_type = other RNA
  modified_base 1: mod_base = OTHER; note = 5'-vinyl-phosphonate-2'-O-methyluridine with phosphorothioate linkage
  modified_base 2: mod_base = OTHER; note = 2'-fluorocytidine with phosphorothioate linkage
  modified_base 3: mod_base = OTHER; note = 2'-O-methyladenosine
  modified_base 4: mod_base = OTHER; note = 2'-O-methylcytidine
  modified_base 5: mod_base = OTHER; note = 2'-O-methylguanosine
  modified_base 6: mod_base = OTHER; note = 2'-fluorocytidine
  modified_base 7: mod_base = OTHER; note = 2'-O-methylcytidine
  modified_base 8: mod_base = OTHER; note = 2'-fluoroguanosine
  modified_base 9: mod_base = OTHER; note = 2'-fluorocytidine
  modified_base 10: mod_base = OTHER; note = 2'-O-methyluridine
  modified_base 11: mod_base = OTHER; note = 2'-O-methylcytidine
  modified_base 12: mod_base = OTHER; note = 2'-O-methyluridine
  modified_base 13: mod_base = OTHER; note = 2'-O-methyluridine
  modified_base 14: mod_base = OTHER; note = 2'-fluorouridine
  modified_base 15: mod_base = OTHER; note = 2'-O-methylguanosine
  modified_base 16: mod_base = OTHER; note = 2'-fluorouridine
  modified_base 17: mod_base = OTHER; note = 2'-O-methylguanosine
  modified_base 18: mod_base = OTHER; note = 2'-O-methylguanosine
  modified_base 19: mod_base = OTHER; note = 2'-O-methylcytidine
  modified_base 20: mod_base = OTHER; note = 2'-O-methylcytidine
  modified_base 21: mod_base = OTHER; note = 2'-O-methyluridine with phosphorothioate linkage
  modified_base 22: mod_base = OTHER; note = 2'-O-methyluridine with phosphorothioate linkage
  modified_base 23: mod_base = OTHER; note = 2'-O-methylcytidine
tcacgccgctctttgtggccttc

SEQ ID NO: 963 - RNA, 23 nt, synthetic construct
  source 1..23: mol_type = other RNA
  modified_base 1: mod_base = OTHER; note = 5'-vinyl-phosphonate-2'-O-methyluridine with phosphorothioate linkage
  modified_base 2: mod_base = OTHER; note = 2'-fluorouridine with phosphorothioate linkage
  modified_base 3: mod_base = OTHER; note = 2'-O-methylcytidine
  modified_base 4: mod_base = OTHER; note = 2'-O-methyladenosine
  modified_base 5: mod_base = OTHER; note = 2'-O-methylcytidine
  modified_base 6: mod_base = OTHER; note = 2'-fluoroguanosine
  modified_base 7: mod_base = OTHER; note = 2'-O-methylcytidine
  modified_base 8: mod_base = OTHER; note = 2'-fluorocytidine
  modified_base 9: mod_base = OTHER; note = 2'-fluoroguanosine
  modified_base 10: mod_base = OTHER; note = 2'-O-methylcytidine
  modified_base 11: mod_base = OTHER; note = 2'-O-methyluridine
  modified_base 12: mod_base = OTHER; note = 2'-O-methylcytidine
  modified_base 13: mod_base = OTHER; note = 2'-O-methyluridine
  modified_base 14: mod_base = OTHER; note = 2'-fluorouridine
  modified_base 15: mod_base = OTHER; note = 2'-O-methyluridine
  modified_base 16: mod_base = OTHER; note = 2'-fluoroguanosine
  modified_base 17: mod_base = OTHER; note = 2'-O-methyluridine
  modified_base 18: mod_base = OTHER; note = 2'-O-methylguanosine
  modified_base 19: mod_base = OTHER; note = 2'-O-methylguanosine
  modified_base 20: mod_base = OTHER; note = 2'-O-methylcytidine
  modified_base 21: mod_base = OTHER; note = 2'-O-methylcytidine with phosphorothioate linkage
  modified_base 22: mod_base = OTHER; note = 2'-O-methyluridine with phosphorothioate linkage
  modified_base 23: mod_base = OTHER; note = 2'-O-methyluridine
ttcacgccgctctttgtggcctt

SEQ ID NO: 964 - RNA, 23 nt, synthetic construct
  source 1..23: mol_type = other RNA
  modified_base 1: mod_base = OTHER; note = 5'-vinyl-phosphonate-2'-O-methyluridine with phosphorothioate linkage
  modified_base 2: mod_base = OTHER; note = 2'-fluoroguanosine with phosphorothioate linkage
  modified_base 3: mod_base = OTHER; note = 2'-O-methylcytidine
  modified_base 4: mod_base = OTHER; note = 2'-O-methyluridine
  modified_base 5: mod_base = OTHER; note = 2'-O-methylcytidine
  modified_base 6: mod_base = OTHER; note = 2'-fluoroadenosine
  modified_base 7: mod_base = OTHER; note = 2'-O-methylcytidine
  modified_base 8: mod_base = OTHER; note = 2'-fluoroguanosine
  modified_base 9: mod_base = OTHER; note = 2'-fluorocytidine
  modified_base 10: mod_base = OTHER; note = 2'-O-methylcytidine
  modified_base 11: mod_base = OTHER; note = 2'-O-methylguanosine
  modified_base 12: mod_base = OTHER; note = 2'-O-methylcytidine
  modified_base 13: mod_base = OTHER; note = 2'-O-methyluridine
  modified_base 14: mod_base = OTHER; note = 2'-fluorocytidine
  modified_base 15: mod_base = OTHER; note = 2'-O-methyluridine
  modified_base 16: mod_base = OTHER; note = 2'-fluorouridine
  modified_base 17: mod_base = OTHER; note = 2'-O-methyluridine
  modified_base 18: mod_base = OTHER; note = 2'-O-methylguanosine
  modified_base 19: mod_base = OTHER; note = 2'-O-methyluridine
  modified_base 20: mod_base = OTHER; note = 2'-O-methylguanosine
  modified_base 21: mod_base = OTHER; note = 2'-O-methylguanosine with phosphorothioate linkage
  modified_base 22: mod_base = OTHER; note = 2'-O-methylcytidine with phosphorothioate linkage
  modified_base 23: mod_base = OTHER; note = 2'-O-methylcytidine
tgctcacgccgctctttgtggcc

SEQ ID NO: 965 - RNA, 23 nt, synthetic construct
  source 1..23: mol_type = other RNA
  modified_base 1: mod_base = OTHER; note = 5'-vinyl-phosphonate-2'-O-methyluridine with phosphorothioate linkage
  modified_base 2: mod_base = OTHER; note = 2'-fluorouridine with phosphorothioate linkage
  modified_base 3: mod_base = OTHER; note = 2'-O-methylguanosine
  modified_base 4: mod_base = OTHER; note = 2'-O-methylcytidine
  modified_base 5: mod_base = OTHER; note = 2'-O-methyluridine
  modified_base 6: mod_base = OTHER; note = 2'-fluorocytidine
  modified_base 7: mod_base = OTHER; note = 2'-O-methyladenosine
  modified_base 8: mod_base = OTHER; note = 2'-fluorocytidine
  modified_base 9: mod_base = OTHER; note = 2'-fluoroguanosine
  modified_base 10: mod_base = OTHER; note = 2'-O-methylcytidine
  modified_base 11: mod_base = OTHER; note = 2'-O-methylcytidine
  modified_base 12: mod_base = OTHER; note = 2'-O-methylguanosine
  modified_base 13: mod_base = OTHER; note = 2'-O-methylcytidine
  modified_base 14: mod_base = OTHER; note = 2'-fluorouridine
  modified_base 15: mod_base = OTHER; note = 2'-O-methylcytidine
  modified_base 16: mod_base = OTHER; note = 2'-fluorouridine
  modified_base 17: mod_base = OTHER; note = 2'-O-methyluridine
  modified_base 18: mod_base = OTHER; note = 2'-O-methyluridine
  modified_base 19: mod_base = OTHER; note = 2'-O-methylguanosine
  modified_base 20: mod_base = OTHER; note = 2'-O-methyluridine
  modified_base 21: mod_base = OTHER; note = 2'-O-methylguanosine with phosphorothioate linkage
  modified_base 22: mod_base = OTHER; note = 2'-O-methylguanosine with phosphorothioate linkage
  modified_base 23: mod_base = OTHER; note = 2'-O-methylcytidine
ttgctcacgccgctctttgtggc

SEQ ID NO: 966 - RNA, 23 nt, synthetic construct
  source 1..23: mol_type = other RNA
  modified_base 1: mod_base = OTHER; note = 5'-vinyl-phosphonate-2'-O-methyluridine with phosphorothioate linkage
  modified_base 2: mod_base = OTHER; note = 2'-fluorocytidine with phosphorothioate linkage
  modified_base 3: mod_base = OTHER; note = 2'-O-methyluridine
  modified_base 4: mod_base = OTHER; note = 2'-O-methylguanosine
  modified_base 5: mod_base = OTHER; note = 2'-O-methylguanosine
  modified_base 6: mod_base = OTHER; note = 2'-fluorocytidine
  modified_base 7: mod_base = OTHER; note = 2'-O-methylcytidine
  modified_base 8: mod_base = OTHER; note = 2'-fluoroguanosine
  modified_base 9: mod_base = OTHER; note = 2'-fluoroadenosine
  modified_base 10: mod_base = OTHER; note = 2'-O-methylcytidine
  modified_base 11: mod_base = OTHER; note = 2'-O-methylguanosine
  modified_base 12: mod_base = OTHER; note = 2'-O-methylguanosine
  modified_base 13: mod_base = OTHER; note = 2'-O-methylcytidine
  modified_base 14: mod_base = OTHER; note = 2'-fluoroguanosine
  modified_base 15: mod_base = OTHER; note = 2'-O-methylcytidine
  modified_base 16: mod_base = OTHER; note = 2'-fluoroguanosine
  modified_base 17: mod_base = OTHER; note = 2'-O-methylguanosine
  modified_base 18: mod_base = OTHER; note = 2'-O-methyluridine
  modified_base 19: mod_base = OTHER; note = 2'-O-methylguanosine
  modified_base 20: mod_base = OTHER; note = 2'-O-methylcytidine
  modified_base 21: mod_base = OTHER; note = 2'-O-methyluridine with phosphorothioate linkage
  modified_base 22: mod_base = OTHER; note = 2'-O-methylguanosine with phosphorothioate linkage
  modified_base 23: mod_base = OTHER; note = 2'-O-methylcytidine
tctggccgacggcgcggtgctgc

SEQ ID NO: 967 - RNA, 23 nt, synthetic construct
  source 1..23: mol_type = other RNA
  modified_base 1: mod_base = OTHER; note = 5'-vinyl-phosphonate-2'-O-methyluridine with phosphorothioate linkage
  modified_base 2: mod_base = OTHER; note = 2'-fluorouridine with phosphorothioate linkage
  modified_base 3: mod_base = OTHER; note = 2'-O-methylguanosine
  modified_base 4: mod_base = OTHER; note = 2'-O-methylguanosine
  modified_base 5: mod_base = OTHER; note = 2'-O-methylcytidine
  modified_base 6: mod_base = OTHER; note = 2'-fluoroguanosine
  modified_base 7: mod_base = OTHER; note = 2'-O-methylcytidine
  modified_base 8: mod_base = OTHER; note = 2'-fluorouridine
  modified_base 9: mod_base = OTHER; note = 2'-fluoroguanosine
  modified_base 10: mod_base = OTHER; note = 2'-O-methylguanosine
  modified_base 11: mod_base = OTHER; note = 2'-O-methylcytidine
  modified_base 12: mod_base = OTHER; note = 2'-O-methylcytidine
  modified_base 13: mod_base = OTHER; note = 2'-O-methylguanosine
  modified_base 14: mod_base = OTHER; note = 2'-fluoroadenosine
  modified_base 15: mod_base = OTHER; note = 2'-O-methylcytidine
  modified_base 16: mod_base = OTHER; note = 2'-fluoroguanosine
  modified_base 17: mod_base = OTHER; note = 2'-O-methylguanosine
  modified_base 18: mod_base = OTHER; note = 2'-O-methylcytidine
  modified_base 19: mod_base = OTHER; note = 2'-O-methylguanosine
  modified_base 20: mod_base = OTHER; note = 2'-O-methylcytidine
  modified_base 21: mod_base = OTHER; note = 2'-O-methylguanosine with phosphorothioate linkage
  modified_base 22: mod_base = OTHER; note = 2'-O-methylguanosine with phosphorothioate linkage
  modified_base 23: mod_base = OTHER; note = 2'-O-methyluridine
ttggcgctggccgacggcgcggt

SEQ ID NO: 968 - RNA, 23 nt, synthetic construct
  source 1..23: mol_type = other RNA
  modified_base 1: mod_base = OTHER; note = 5'-vinyl-phosphonate-2'-O-methyluridine with phosphorothioate linkage
  modified_base 2: mod_base = OTHER; note = 2'-fluorocytidine with phosphorothioate linkage
  modified_base 3: mod_base = OTHER; note = 2'-O-methyluridine
  modified_base 4: mod_base = OTHER; note = 2'-O-methylguanosine
  modified_base 5: mod_base = OTHER; note = 2'-O-methylguanosine
  modified_base 6: mod_base = OTHER; note = 2'-fluorocytidine
  modified_base 7: mod_base = OTHER; note = 2'-O-methylguanosine
  modified_base 8: mod_base = OTHER; note = 2'-fluorocytidine
  modified_base 9: mod_base = OTHER; note = 2'-fluorouridine
  modified_base 10: mod_base = OTHER; note = 2'-O-methylguanosine
  modified_base 11: mod_base = OTHER; note = 2'-O-methylguanosine
  modified_base 12: mod_base = OTHER; note = 2'-O-methylcytidine
  modified_base 13: mod_base = OTHER; note = 2'-O-methylcytidine
  modified_base 14: mod_base = OTHER; note = 2'-fluoroguanosine
  modified_base 15: mod_base = OTHER; note = 2'-O-methyladenosine
  modified_base 16: mod_base = OTHER; note = 2'-fluorocytidine
  modified_base 17: mod_base = OTHER; note = 2'-O-methylguanosine
  modified_base 18: mod_base = OTHER; note = 2'-O-methylguanosine
  modified_base 19: mod_base = OTHER; note = 2'-O-methylcytidine
  modified_base 20: mod_base = OTHER; note = 2'-O-methylguanosine
  modified_base 21: mod_base = OTHER; note = 2'-O-methylcytidine with phosphorothioate linkage
  modified_base 22: mod_base = OTHER; note = 2'-O-methylguanosine with phosphorothioate linkage
  modified_base 23: mod_base = OTHER; note = 2'-O-methylguanosine
tctggcgctggccgacggcgcgg

SEQ ID NO: 969 - RNA, 23 nt, synthetic construct
  source 1..23: mol_type = other RNA
  modified_base 1: mod_base = OTHER; note = 5'-vinyl-phosphonate-2'-O-methyluridine with phosphorothioate linkage
  modified_base 2: mod_base = OTHER; note = 2'-fluorouridine with phosphorothioate linkage
  modified_base 3: mod_base = OTHER; note = 2'-O-methylguanosine
  modified_base 4: mod_base = OTHER; note = 2'-O-methylguanosine
  modified_base 5: mod_base = OTHER; note = 2'-O-methylcytidine
  modified_base 6: mod_base = OTHER; note = 2'-fluoroguanosine
  modified_base 7: mod_base = OTHER; note = 2'-O-methylguanosine
  modified_base 8: mod_base = OTHER; note = 2'-fluorocytidine
  modified_base 9: mod_base = OTHER; note = 2'-fluorocytidine
  modified_base 10: mod_base = OTHER; note = 2'-O-methyladenosine
  modified_base 11: mod_base = OTHER; note = 2'-O-methylcytidine
  modified_base 12: mod_base = OTHER; note = 2'-O-methylguanosine
  modified_base 13: mod_base = OTHER; note = 2'-O-methylcytidine
  modified_base 14: mod_base = OTHER; note = 2'-fluorouridine
  modified_base 15: mod_base = OTHER; note = 2'-O-methyluridine
  modified_base 16: mod_base = OTHER; note = 2'-fluoroguanosine
  modified_base 17: mod_base = OTHER; note = 2'-O-methyluridine
  modified_base 18: mod_base = OTHER; note = 2'-O-methylguanosine
  modified_base 19: mod_base = OTHER; note = 2'-O-methylcytidine
  modified_base 20: mod_base = OTHER; note = 2'-O-methyluridine
  modified_base 21: mod_base = OTHER; note = 2'-O-methylguanosine with phosphorothioate linkage
  modified_base 22: mod_base = OTHER; note = 2'-O-methylcytidine with phosphorothioate linkage
  modified_base 23: mod_base = OTHER; note = 2'-O-methyladenosine
ttggcggccacgcttgtgctgca

SEQ ID NO: 970 - RNA, 23 nt, synthetic construct
  source 1..23: mol_type = other RNA
  modified_base 1: mod_base = OTHER; note = 5'-vinyl-phosphonate-2'-O-methyluridine with phosphorothioate linkage
  modified_base 2: mod_base = OTHER; note = 2'-fluorocytidine with phosphorothioate linkage
  modified_base 3: mod_base = OTHER; note = 2'-O-methyluridine
  modified_base 4: mod_base = OTHER; note = 2'-O-methylguanosine
  modified_base 5: mod_base = OTHER; note = 2'-O-methylguanosine
  modified_base 6: mod_base = OTHER; note = 2'-fluorocytidine
  modified_base 7: mod_base = OTHER; note = 2'-O-methylguanosine
  modified_base 8: mod_base = OTHER; note = 2'-fluoroguanosine
  modified_base 9: mod_base = OTHER; note = 2'-fluorocytidine
  modified_base 10: mod_base = OTHER; note = 2'-O-methylcytidine
  modified_base 11: mod_base = OTHER; note = 2'-O-methyladenosine
  modified_base 12: mod_base = OTHER; note = 2'-O-methylcytidine
  modified_base 13: mod_base = OTHER; note = 2'-O-methylguanosine
  modified_base 14: mod_base = OTHER; note = 2'-fluorocytidine
  modified_base 15: mod_base = OTHER; note = 2'-O-methyluridine
  modified_base 16: mod_base = OTHER; note = 2'-fluorouridine
  modified_base 17: mod_base = OTHER; note = 2'-O-methylguanosine
  modified_base 18: mod_base = OTHER; note = 2'-O-methyluridine
  modified_base 19: mod_base = OTHER; note = 2'-O-methylguanosine
  modified_base 20: mod_base = OTHER; note = 2'-O-methylcytidine
  modified_base 21: mod_base = OTHER; note = 2'-O-methyluridine with phosphorothioate linkage
  modified_base 22: mod_base = OTHER; note = 2'-O-methylguanosine with phosphorothioate linkage
  modified_base 23: mod_base = OTHER; note = 2'-O-methylcytidine
tctggcggccacgcttgtgctgc

SEQ ID NO: 971 - RNA, 23 nt, synthetic construct
  source 1..23: mol_type = other RNA
  modified_base 1: mod_base = OTHER; note = 5'-vinyl-phosphonate-2'-O-methyluridine with phosphorothioate linkage
  modified_base 2: mod_base = OTHER; note = 2'-fluoroguanosine with phosphorothioate linkage
  modified_base 3: mod_base = OTHER; note = 2'-O-methylcytidine
  modified_base 4: mod_base = OTHER; note = 2'-O-methyluridine
  modified_base 5: mod_base = OTHER; note = 2'-O-methylguanosine
  modified_base 6: mod_base = OTHER; note = 2'-fluoroguanosine
  modified_base 7: mod_base = OTHER; note = 2'-O-methylcytidine
  modified_base 8: mod_base = OTHER; note = 2'-fluoroguanosine
  modified_base 9: mod_base = OTHER; note = 2'-fluoroguanosine
  modified_base 10: mod_base = OTHER; note = 2'-O-methylcytidine
  modified_base 11: mod_base = OTHER; note = 2'-O-methylcytidine
  modified_base 12: mod_base = OTHER; note = 2'-O-methyladenosine
  modified_base 13: mod_base = OTHER; note = 2'-O-methylcytidine
  modified_base 14: mod_base = OTHER; note = 2'-fluoroguanosine
  modified_base 15: mod_base = OTHER; note = 2'-O-methylcytidine
  modified_base 16: mod_base = OTHER; note = 2'-fluorouridine
  modified_base 17: mod_base = OTHER; note = 2'-O-methyluridine
  modified_base 18: mod_base = OTHER; note = 2'-O-methylguanosine
  modified_base 19: mod_base = OTHER; note = 2'-O-methyluridine
  modified_base 20: mod_base = OTHER; note = 2'-O-methylguanosine
  modified_base 21: mod_base = OTHER; note = 2'-O-methylcytidine with phosphorothioate linkage
  modified_base 22: mod_base = OTHER; note = 2'-O-methyluridine with phosphorothioate linkage
  modified_base 23: mod_base = OTHER; note = 2'-O-methylguanosine
tgctggcggccacgcttgtgctg

SEQ ID NO: 972 - RNA, 23 nt, synthetic construct
  source 1..23: mol_type = other RNA
  modified_base 1: mod_base = OTHER; note = 5'-vinyl-phosphonate-2'-O-methyluridine with phosphorothioate linkage
  modified_base 2: mod_base = OTHER; note = 2'-fluoroadenosine with phosphorothioate linkage
  modified_base 3: mod_base = OTHER; note = 2'-O-methylcytidine
  modified_base 4: mod_base = OTHER; note = 2'-O-methylcytidine
  modified_base 5: mod_base = OTHER; note = 2'-O-methylguanosine
  modified_base 6: mod_base = OTHER; note = 2'-fluorocytidine
  modified_base 7: mod_base = OTHER; note = 2'-O-methyluridine
  modified_base 8: mod_base = OTHER; note = 2'-fluoroguanosine
  modified_base 9: mod_base = OTHER; note = 2'-fluoroguanosine
  modified_base 10: mod_base = OTHER; note = 2'-O-methylcytidine
  modified_base 11: mod_base = OTHER; note = 2'-O-methylguanosine
  modified_base 12: mod_base = OTHER; note = 2'-O-methylguanosine
  modified_base 13: mod_base = OTHER; note = 2'-O-methylcytidine
  modified_base 14: mod_base = OTHER; note = 2'-fluorocytidine
  modified_base 15: mod_base = OTHER; note = 2'-O-methyladenosine
  modified_base 16: mod_base = OTHER; note = 2'-fluorocytidine
  modified_base 17: mod_base = OTHER; note = 2'-O-methylguanosine
  modified_base 18: mod_base = OTHER; note = 2'-O-methylcytidine
  modified_base 19: mod_base = OTHER; note = 2'-O-methyluridine
  modified_base 20: mod_base = OTHER; note = 2'-O-methyluridine
  modified_base 21: mod_base = OTHER; note = 2'-O-methylguanosine with phosphorothioate linkage
  modified_base 22: mod_base = OTHER; note = 2'-O-methyluridine with phosphorothioate linkage
  modified_base 23: mod_base = OTHER; note = 2'-O-methylguanosine
taccgctggcggccacgcttgtg

SEQ ID NO: 973 - RNA, 23 nt, synthetic construct
  source 1..23: mol_type = other RNA
  modified_base 1: mod_base = OTHER; note = 5'-vinyl-phosphonate-2'-O-methyluridine with phosphorothioate linkage
  modified_base 2: mod_base = OTHER; note = 2'-fluoroguanosine with phosphorothioate linkage
  modified_base 3: mod_base = OTHER; note = 2'-O-methyladenosine
  modified_base 4: mod_base = OTHER; note = 2'-O-methylcytidine
  modified_base 5: mod_base = OTHER; note = 2'-O-methylcytidine
  modified_base 6: mod_base = OTHER; note = 2'-fluoroguanosine
  modified_base 7: mod_base = OTHER; note = 2'-O-methylcytidine
  modified_base 8: mod_base = OTHER; note = 2'-fluorouridine
  modified_base 9: mod_base = OTHER; note = 2'-fluoroguanosine
  modified_base 10: mod_base = OTHER; note = 2'-O-methylguanosine
  modified_base 11: mod_base = OTHER; note = 2'-O-methylcytidine
  modified_base 12: mod_base = OTHER; note = 2'-O-methylguanosine
  modified_base 13: mod_base = OTHER; note = 2'-O-methylguanosine
  modified_base 14: mod_base = OTHER; note = 2'-fluorocytidine
  modified_base 15: mod_base = OTHER; note = 2'-O-methylcytidine
  modified_base 16: mod_base = OTHER; note = 2'-fluoroadenosine
  modified_base 17: mod_base = OTHER; note = 2'-O-methylcytidine
  modified_base 18: mod_base = OTHER; note = 2'-O-methylguanosine
  modified_base 19: mod_base = OTHER; note = 2'-O-methylcytidine
  modified_base 20: mod_base = OTHER; note = 2'-O-methyluridine
  modified_base 21: mod_base = OTHER; note = 2'-O-methyluridine with phosphorothioate linkage
  modified_base 22: mod_base = OTHER; note = 2'-O-methylguanosine with phosphorothioate linkage
  modified_base 23: mod_base = OTHER; note = 2'-O-methyluridine
tgaccgctggcggccacgcttgt

SEQ ID NO: 974 - RNA, 23 nt, synthetic construct
  source 1..23: mol_type = other RNA
  modified_base 1: mod_base = OTHER; note = 5'-vinyl-phosphonate-2'-O-methyluridine with phosphorothioate linkage
  modified_base 2: mod_base = OTHER; note = 2'-fluorocytidine with phosphorothioate linkage
  modified_base 3: mod_base = OTHER; note = 2'-O-methylguanosine
  modified_base 4: mod_base = OTHER; note = 2'-O-methyladenosine
  modified_base 5: mod_base = OTHER; note = 2'-O-methylcytidine
  modified_base 6: mod_base = OTHER; note = 2'-fluorocytidine
  modified_base 7: mod_base = OTHER; note = 2'-O-methylguanosine
  modified_base 8: mod_base = OTHER; note = 2'-fluorocytidine
  modified_base 9: mod_base = OTHER; note = 2'-fluorouridine
  modified_base 10: mod_base = OTHER; note = 2'-O-methylguanosine
  modified_base 11: mod_base = OTHER; note = 2'-O-methylguanosine
  modified_base 12: mod_base = OTHER; note = 2'-O-methylcytidine
  modified_base 13: mod_base = OTHER; note = 2'-O-methylguanosine
  modified_base 14: mod_base = OTHER; note = 2'-fluoroguanosine
  modified_base 15: mod_base = OTHER; note = 2'-O-methylcytidine
  modified_base 16: mod_base = OTHER; note = 2'-fluorocytidine
  modified_base 17: mod_base = OTHER; note = 2'-O-methyladenosine
  modified_base 18: mod_base = OTHER; note = 2'-O-methylcytidine
  modified_base 19: mod_base = OTHER; note = 2'-O-methylguanosine
  modified_base 20: mod_base = OTHER; note = 2'-O-methylcytidine
  modified_base 21: mod_base = OTHER; note = 2'-O-methyluridine with phosphorothioate linkage
  modified_base 22: mod_base = OTHER; note = 2'-O-methyluridine with phosphorothioate linkage
  modified_base 23: mod_base = OTHER; note = 2'-O-methylguanosine
tcgaccgctggcggccacgcttg

SEQ ID NO: 975 - RNA, 23 nt, synthetic construct
  source 1..23: mol_type = other RNA
  modified_base 1: mod_base = OTHER; note = 5'-vinyl-phosphonate-2'-O-methyluridine with phosphorothioate linkage
  modified_base 2: mod_base = OTHER; note = 2'-fluoroguanosine with phosphorothioate linkage
  modified_base 3: mod_base = OTHER; note = 2'-O-methylcytidine
  modified_base 4: mod_base = OTHER; note = 2'-O-methylguanosine
  modified_base 5: mod_base = OTHER; note = 2'-O-methyladenosine
  modified_base 6: mod_base = OTHER; note = 2'-fluorocytidine
  modified_base 7: mod_base = OTHER; note = 2'-O-methylcytidine
  modified_base 8: mod_base = OTHER; note = 2'-fluoroguanosine
  modified_base 9: mod_base = OTHER; note = 2'-fluorocytidine
  modified_base 10: mod_base = OTHER; note = 2'-O-methyluridine
  modified_base 11: mod_base = OTHER; note = 2'-O-methylguanosine
  modified_base 12: mod_base = OTHER; note = 2'-O-methylguanosine
  modified_base 13: mod_base = OTHER; note = 2'-O-methylcytidine
  modified_base 14: mod_base = OTHER; note = 2'-fluoroguanosine
  modified_base 15: mod_base = OTHER; note = 2'-O-methylguanosine
  modified_base 16: mod_base = OTHER; note = 2'-fluorocytidine
  modified_base 17: mod_base = OTHER; note = 2'-O-methylcytidine
  modified_base 18: mod_base = OTHER; note = 2'-O-methyladenosine
  modified_base 19: mod_base = OTHER; note = 2'-O-methylcytidine
  modified_base 20: mod_base = OTHER; note = 2'-O-methylguanosine
  modified_base 21: mod_base = OTHER; note = 2'-O-methylcytidine with phosphorothioate linkage
  modified_base 22: mod_base = OTHER; note = 2'-O-methyluridine with phosphorothioate linkage
  modified_base 23: mod_base = OTHER; note = 2'-O-methyluridine
tgcgaccgctggcggccacgctt

SEQ ID NO: 976 - RNA, 23 nt, synthetic construct
  source 1..23: mol_type = other RNA
  modified_base 1: mod_base = OTHER; note = 5'-vinyl-phosphonate-2'-O-methyluridine with phosphorothioate linkage
  modified_base 2: mod_base = OTHER; note = 2'-fluorocytidine with phosphorothioate linkage
  modified_base 3: mod_base = OTHER; note = 2'-O-methylguanosine
  modified_base 4: mod_base = OTHER; note = 2'-O-methylcytidine
  modified_base 5: mod_base = OTHER; note = 2'-O-methylguanosine
  modified_base 6: mod_base = OTHER; note = 2'-fluoroguanosine
  modified_base 7: mod_base = OTHER; note = 2'-O-methylguanosine
  modified_base 8: mod_base = OTHER; note = 2'-fluorocytidine
  modified_base 9: mod_base = OTHER; note = 2'-fluorocytidine
  modified_base 10: mod_base = OTHER; note = 2'-O-methyladenosine
  modified_base 11: mod_base = OTHER; note = 2'-O-methylcytidine
  modified_base 12: mod_base = OTHER; note = 2'-O-methyladenosine
  modified_base 13: mod_base = OTHER; note = 2'-O-methylguanosine
  modified_base 14: mod_base = OTHER; note = 2'-fluoroguanosine
  modified_base 15: mod_base = OTHER; note = 2'-O-methylcytidine
  modified_base 16: mod_base = OTHER; note = 2'-fluoroadenosine
  modified_base 17: mod_base = OTHER; note = 2'-O-methylcytidine
  modified_base 18: mod_base = OTHER; note = 2'-O-methyladenosine
  modified_base 19: mod_base = OTHER; note = 2'-O-methylguanosine
  modified_base 20: mod_base = OTHER; note = 2'-O-methylcytidine
  modified_base 21: mod_base = OTHER; note = 2'-O-methylcytidine with phosphorothioate linkage
  modified_base 22: mod_base = OTHER; note = 2'-O-methyluridine with phosphorothioate linkage
  modified_base 23: mod_base = OTHER; note = 2'-O-methyluridine
tcgcgggccacaggcacagcctt

SEQ ID NO: 977 - RNA, 23 nt, synthetic construct
  source 1..23: mol_type = other RNA
  modified_base 1: mod_base = OTHER; note = 5'-vinyl-phosphonate-2'-O-methyluridine with phosphorothioate linkage
  modified_base 2: mod_base = OTHER; note = 2'-fluoroadenosine with phosphorothioate linkage
  modified_base 3: mod_base = OTHER; note = 2'-O-methylguanosine
  modified_base 4: mod_base = OTHER; note = 2'-O-methyladenosine
  modified_base 5: mod_base = OTHER; note = 2'-O-methylcytidine
  modified_base 6: mod_base = OTHER; note = 2'-fluorouridine
  modified_base 7: mod_base = OTHER; note = 2'-O-methyluridine
  modified_base 8: mod_base = OTHER; note = 2'-fluorocytidine
  modified_base 9: mod_base = OTHER; note = 2'-fluoroguanosine
  modified_base 10: mod_base = OTHER; note = 2'-O-methylcytidine
  modified_base 11: mod_base = OTHER; note = 2'-O-methylguanosine
  modified_base 12: mod_base = OTHER; note = 2'-O-methylguanosine
  modified_base 13: mod_base = OTHER; note = 2'-O-methylguanosine
  modified_base 14: mod_base = OTHER; note = 2'-fluorocytidine
  modified_base 15: mod_base = OTHER; note = 2'-O-methylcytidine
  modified_base 16: mod_base = OTHER; note = 2'-fluoroadenosine
  modified_base 17: mod_base = OTHER; note = 2'-O-methylcytidine
  modified_base 18: mod_base = OTHER; note = 2'-O-methyladenosine
  modified_base 19: mod_base = OTHER; note = 2'-O-methylguanosine
  modified_base 20: mod_base = OTHER; note = 2'-O-methylguanosine
  modified_base 21: mod_base = OTHER; note = 2'-O-methylcytidine with phosphorothioate linkage
  modified_base 22: mod_base = OTHER; note = 2'-O-methyladenosine with phosphorothioate linkage
  modified_base 23: mod_base = OTHER; note = 2'-O-methylcytidine
tagacttcgcgggccacaggcac

SEQ ID NO: 978 - RNA, 23 nt, synthetic construct
  source 1..23: mol_type = other RNA
  modified_base 1: mod_base = OTHER; note = 5'-vinyl-phosphonate-2'-O-methyluridine with phosphorothioate linkage
  modified_base 2: mod_base = OTHER; note = 2'-fluoroguanosine with phosphorothioate linkage
  modified_base 3: mod_base = OTHER; note = 2'-O-methyladenosine
  modified_base 4: mod_base = OTHER; note = 2'-O-methyladenosine
  modified_base 5: mod_base = OTHER; note = 2'-O-methylguanosine
  modified_base 6: mod_base = OTHER; note = 2'-fluoroadenosine
  modified_base 7: mod_base = OTHER; note = 2'-O-methylcytidine
  modified_base 8: mod_base = OTHER; note = 2'-fluorouridine
  modified_base 9: mod_base = OTHER; note = 2'-fluorouridine
  modified_base 10: mod_base = OTHER; note = 2'-O-methylcytidine
  modified_base 11: mod_base = OTHER; note = 2'-O-methylguanosine
  modified_base 12: mod_base = OTHER; note = 2'-O-methylcytidine
  modified_base 13: mod_base = OTHER; note = 2'-O-methylguanosine
  modified_base 14: mod_base = OTHER; note = 2'-fluoroguanosine
  modified_base 15: mod_base = OTHER; note = 2'-O-methylguanosine
  modified_base 16: mod_base = OTHER; note = 2'-fluorocytidine
  modified_base 17: mod_base = OTHER; note = 2'-O-methylcytidine
  modified_base 18: mod_base = OTHER; note = 2'-O-methyladenosine
  modified_base 19: mod_base = OTHER; note = 2'-O-methylcytidine
  modified_base 20: mod_base = OTHER; note = 2'-O-methyladenosine
  modified_base 21: mod_base = OTHER; note = 2'-O-methylguanosine with phosphorothioate linkage
  modified_base 22: mod_base = OTHER; note = 2'-O-methylguanosine with phosphorothioate linkage
  modified_base 23: mod_base = OTHER; note = 2'-O-methylcytidine
tgaagacttcgcgggccacaggc

SEQ ID NO: 979 - RNA, 23 nt, synthetic construct
  source 1..23: mol_type = other RNA
  modified_base 1: mod_base = OTHER; note = 5'-vinyl-phosphonate-2'-O-methyluridine with phosphorothioate linkage
  modified_base 2: mod_base = OTHER; note = 2'-fluoroadenosine with phosphorothioate linkage
  modified_base 3: mod_base = OTHER; note = 2'-O-methylguanosine
  modified_base 4: mod_base = OTHER; note = 2'-O-methylcytidine
  modified_base 5: mod_base = OTHER; note = 2'-O-methyluridine
  modified_base 6: mod_base = OTHER; note = 2'-fluoroguanosine
  modified_base 7: mod_base = OTHER; note = 2'-O-methylguanosine
  modified_base 8: mod_base = OTHER; note = 2'-fluoroadenosine
  modified_base 9: mod_base = OTHER; note = 2'-fluoroadenosine
  modified_base 10: mod_base = OTHER; note = 2'-O-methylguanosine
  modified_base 11: mod_base = OTHER; note = 2'-O-methyladenosine
  modified_base 12: mod_base = OTHER; note = 2'-O-methylcytidine
  modified_base 13: mod_base = OTHER; note = 2'-O-methyluridine
  modified_base 14: mod_base = OTHER; note = 2'-fluorouridine
  modified_base 15: mod_base = OTHER; note = 2'-O-methylcytidine
  modified_base 16: mod_base = OTHER; note = 2'-fluoroguanosine
  modified_base 17: mod_base = OTHER; note = 2'-O-methylcytidine
  modified_base 18: mod_base = OTHER; note = 2'-O-methylguanosine
  modified_base 19: mod_base = OTHER; note = 2'-O-methylguanosine
  modified_base 20: mod_base = OTHER; note = 2'-O-methylguanosine
  modified_base 21: mod_base = OTHER; note = 2'-O-methylcytidine with phosphorothioate linkage
  modified_base 22: mod_base = OTHER; note = 2'-O-methylcytidine with phosphorothioate linkage
  modified_base 23: mod_base = OTHER; note = 2'-O-methyladenosine
tagctggaagacttcgcgggcca

SEQ ID NO: 980 - RNA, 23 nt, synthetic construct
  source 1..23: mol_type = other RNA
  modified_base 1: mod_base = OTHER; note = 5'-vinyl-phosphonate-2'-O-methyluridine with phosphorothioate linkage
  modified_base 2: mod_base = OTHER; note = 2'-fluoroguanosine with phosphorothioate linkage
  modified_base 3: mod_base = OTHER; note = 2'-O-methyladenosine
  modified_base 4: mod_base = OTHER; note = 2'-O-methylguanosine
  modified_base 5: mod_base = OTHER; note = 2'-O-methylcytidine
  modified_base 6: mod_base = OTHER; note = 2'-fluorouridine
  modified_base 7: mod_base = OTHER; note = 2'-O-methylguanosine
  modified_base 8: mod_base = OTHER; note = 2'-fluoroguanosine
  modified_base 9: mod_base = OTHER; note = 2'-fluoroadenosine
  modified_base 10: mod_base = OTHER; note = 2'-O-methyladenosine
  modified_base 11: mod_base = OTHER; note = 2'-O-methylguanosine
  modified_base 12: mod_base = OTHER; note = 2'-O-methyladenosine
  modified_base 13: mod_base = OTHER; note = 2'-O-methylcytidine
  modified_base 14: mod_base = OTHER; note = 2'-fluorouridine
  modified_base 15: mod_base = OTHER; note = 2'-O-methyluridine
  modified_base 16: mod_base = OTHER; note = 2'-fluorocytidine
  modified_base 17: mod_base = OTHER; note = 2'-O-methylguanosine
  modified_base 18: mod_base = OTHER; note = 2'-O-methylcytidine
  modified_base 19: mod_base = OTHER; note = 2'-O-methylguanosine
  modified_base 20: mod_base = OTHER; note = 2'-O-methylguanosine
  modified_base 21: mod_base = OTHER; note = 2'-O-methylguanosine with phosphorothioate linkage
  modified_base 22: mod_base = OTHER; note = 2'-O-methylcytidine with phosphorothioate linkage
  modified_base 23: mod_base = OTHER; note = 2'-O-methylcytidine
tgagctggaagacttcgcgggcc

SEQ ID NO: 981 - RNA, 23 nt, synthetic construct
  source 1..23: mol_type = other RNA
  modified_base 1: mod_base = OTHER; note = 5'-vinyl-phosphonate-2'-O-methyluridine with phosphorothioate linkage
  modified_base 2: mod_base = OTHER; note = 2'-fluorouridine with phosphorothioate linkage
  modified_base 3: mod_base = OTHER; note = 2'-O-methylguanosine
  modified_base 4: mod_base = OTHER; note = 2'-O-methyladenosine
  modified_base 5: mod_base = OTHER; note = 2'-O-methylguanosine
  modified_base 6: mod_base = OTHER; note = 2'-fluorocytidine
  modified_base 7: mod_base = OTHER; note = 2'-O-methyluridine
  modified_base 8: mod_base = OTHER; note = 2'-fluoroguanosine
  modified_base 9: mod_base = OTHER; note = 2'-fluoroguanosine
  modified_base 10: mod_base = OTHER; note = 2'-O-methyladenosine
  modified_base 11: mod_base = OTHER; note = 2'-O-methyladenosine
  modified_base 12: mod_base = OTHER; note = 2'-O-methylguanosine
  modified_base 13: mod_base = OTHER; note = 2'-O-methyladenosine
  modified_base 14: mod_base = OTHER; note = 2'-fluorocytidine
  modified_base 15: mod_base = OTHER; note = 2'-O-methyluridine
  modified_base 16: mod_base = OTHER; note = 2'-fluorouridine
  modified_base 17: mod_base = OTHER; note = 2'-O-methylcytidine
  modified_base 18: mod_base = OTHER; note = 2'-O-methylguanosine
  modified_base 19: mod_base = OTHER; note = 2'-O-methylcytidine
  modified_base 20: mod_base = OTHER; note = 2'-O-methylguanosine
  modified_base 21: mod_base = OTHER; note = 2'-O-methylguanosine with phosphorothioate linkage
  modified_base 22: mod_base = OTHER; note = 2'-O-methylguanosine with phosphorothioate linkage
  modified_base 23: mod_base = OTHER; note = 2'-O-methylcytidine
ttgagctggaagacttcgcgggc

SEQ ID NO: 982 - RNA, 23 nt, synthetic construct
  source 1..23: mol_type = other RNA
  modified_base 1: mod_base = OTHER; note = 5'-vinyl-phosphonate-2'-O-methyluridine with phosphorothioate linkage
  modified_base 2: mod_base = OTHER; note = 2'-fluorocytidine with phosphorothioate linkage
  modified_base 3: mod_base = OTHER; note = 2'-O-methylguanosine
  modified_base 4: mod_base = OTHER; note = 2'-O-methyladenosine
  modified_base 5: mod_base = OTHER; note = 2'-O-methylguanosine
  modified_base 6: mod_base = OTHER; note = 2'-fluoroadenosine
  modified_base 7: mod_base = OTHER; note = 2'-O-methylcytidine
  modified_base 8: mod_base = OTHER; note = 2'-fluoroadenosine
  modified_base 9: mod_base = OTHER; note = 2'-fluorocytidine
  modified_base 10: mod_base = OTHER; note = 2'-O-methyluridine
  modified_base 11: mod_base = OTHER; note = 2'-O-methylguanosine
  modified_base 12: mod_base = OTHER; note = 2'-O-methylcytidine
  modified_base 13: mod_base = OTHER; note = 2'-O-methyluridine
  modified_base 14: mod_base = OTHER; note = 2'-fluoroguanosine
  modified_base 15: mod_base = OTHER; note = 2'-O-methyladenosine
  modified_base 16: mod_base = OTHER; note = 2'-fluoroguanosine
  modified_base 17: mod_base = OTHER; note = 2'-O-methylcytidine
  modified_base 18: mod_base = OTHER; note = 2'-O-methyluridine
  modified_base 19: mod_base = OTHER; note = 2'-O-methylguanosine
  modified_base 20: mod_base = OTHER; note = 2'-O-methylguanosine
  modified_base 21: mod_base = OTHER; note = 2'-O-methyladenosine with phosphorothioate linkage
  modified_base 22: mod_base = OTHER; note = 2'-O-methyladenosine with phosphorothioate linkage
  modified_base 23: mod_base = OTHER; note = 2'-O-methylguanosine
tcgagacactgctgagctggaag

SEQ ID NO: 983 - RNA, 23 nt, synthetic construct
  source 1..23: mol_type = other RNA
  modified_base 1: mod_base = OTHER; note = 5'-vinyl-phosphonate-2'-O-methyluridine with phosphorothioate linkage
  modified_base 2: mod_base = OTHER; note = 2'-fluoroadenosine with phosphorothioate linkage
  modified_base 3: mod_base = OTHER; note = 2'-O-methyladenosine
  modified_base 4: mod_base = OTHER; note = 2'-O-methylcytidine
  modified_base 5: mod_base = OTHER; note = 2'-O-methylguanosine
  modified_base 6: mod_base = OTHER; note = 2'-fluoroadenosine
  modified_base 7: mod_base = OTHER; note = 2'-O-methylguanosine
  modified_base 8: mod_base = OTHER; note = 2'-fluoroadenosine
  modified_base 9: mod_base = OTHER; note = 2'-fluorocytidine
  modified_base 10: mod_base = OTHER; note = 2'-O-methyladenosine
  modified_base 11: mod_base = OTHER; note = 2'-O-methylcytidine
  modified_base 12: mod_base = OTHER; note = 2'-O-methyluridine
  modified_base 13: mod_base = OTHER; note = 2'-O-methylguanosine
  modified_base 14: mod_base = OTHER; note = 2'-fluorocytidine
  modified_base 15: mod_base = OTHER; note = 2'-O-methyluridine
  modified_base 16: mod_base = OTHER; note = 2'-fluoroguanosine
  modified_base 17: mod_base = OTHER; note = 2'-O-methyladenosine
  modified_base 18: mod_base = OTHER; note = 2'-O-methylguanosine
  modified_base 19: mod_base = OTHER; note = 2'-O-methylcytidine
  modified_base 20: mod_base = OTHER; note = 2'-O-methyluridine
  modified_base 21: mod_base = OTHER; note = 2'-O-methylguanosine with phosphorothioate linkage
  modified_base 22: mod_base = OTHER; note = 2'-O-methylguanosine with phosphorothioate linkage
  modified_base 23: mod_base = OTHER; note = 2'-O-methyladenosine
taacgagacactgctgagctgga

SEQ ID NO: 984 - RNA, 23 nt, synthetic construct
  source 1..23: mol_type = other RNA
  modified_base 1: mod_base = OTHER; note = 5'-vinyl-phosphonate-2'-O-methyluridine with phosphorothioate linkage
  modified_base 2: mod_base = OTHER; note = 2'-fluoroguanosine with phosphorothioate linkage
  modified_base 3: mod_base = OTHER; note = 2'-O-methyladenosine
  modified_base 4: mod_base = OTHER; note = 2'-O-methylcytidine
  modified_base 5: mod_base = OTHER; note = 2'-O-methyluridine
  modified_base 6: mod_base = OTHER; note = 2'-fluorouridine
  modified_base 7: mod_base = OTHER; note = 2'-O-methyluridine
  modified_base 8: mod_base = OTHER; note = 2'-fluoroadenosine
  modified_base 9: mod_base = OTHER; note = 2'-fluoroguanosine
  modified_base 10: mod_base = OTHER; note = 2'-O-methylcytidine
  modified_base 11: mod_base = OTHER; note = 2'-O-methyluridine
  modified_base 12: mod_base = OTHER; note = 2'-O-methyluridine
  modified_base 13: mod_base = OTHER; note = 2'-O-methylcytidine
  modified_base 14: mod_base = OTHER; note = 2'-fluorouridine
  modified_base 15: mod_base = OTHER; note = 2'-O-methylguanosine
  modified_base 16: mod_base = OTHER; note = 2'-fluoroguanosine
  modified_base 17: mod_base = OTHER; note = 2'-O-methyluridine
  modified_base 18: mod_base = OTHER; note = 2'-O-methylguanosine
  modified_base 19: mod_base = OTHER; note = 2'-O-methylcytidine
  modified_base 20: mod_base = OTHER; note = 2'-O-methylguanosine
  modified_base 21: mod_base = OTHER; note = 2'-O-methylcytidine with phosphorothioate linkage
  modified_base 22: mod_base = OTHER; note = 2'-O-methyluridine with phosphorothioate linkage
  modified_base 23: mod_base = OTHER; note = 2'-O-methylguanosine
tgactttagcttctggtgcgctg

SEQ ID NO: 985 - RNA, 23 nt, synthetic construct
  source 1..23: mol_type = other RNA
  modified_base 1: mod_base = OTHER; note = 5'-vinyl-phosphonate-2'-O-methyluridine with phosphorothioate linkage
  modified_base 2: mod_base = OTHER; note = 2'-fluorocytidine with phosphorothioate linkage
  modified_base 3: mod_base = OTHER; note = 2'-O-methyladenosine
  modified_base 4: mod_base = OTHER; note = 2'-O-methyluridine
  modified_base 5: mod_base = OTHER; note = 2'-O-methylcytidine
  modified_base 6: mod_base = OTHER; note = 2'-fluoroadenosine
  modified_base 7: mod_base = OTHER; note = 2'-O-methyladenosine
  modified_base 8: mod_base = OTHER; note = 2'-fluoroguanosine
  modified_base 9: mod_base = OTHER; note = 2'-fluoroadenosine
  modified_base 10: mod_base = OTHER; note = 2'-O-methylcytidine
  modified_base 11: mod_base = OTHER; note = 2'-O-methyluridine
  modified_base 12: mod_base = OTHER; note = 2'-O-methyluridine
  modified_base 13: mod_base = OTHER; note = 2'-O-methyluridine
  modified_base 14: mod_base = OTHER; note = 2'-fluoroadenosine
  modified_base 15: mod_base = OTHER; note = 2'-O-methylguanosine
  modified_base 16: mod_base = OTHER; note = 2'-fluorocytidine
  modified_base 17: mod_base = OTHER; note = 2'-O-methyluridine
  modified_base 18: mod_base = OTHER; note = 2'-O-methyluridine
  modified_base 19: mod_base = OTHER; note = 2'-O-methylcytidine
  modified_base 20: mod_base = OTHER; note = 2'-O-methyluridine
  modified_base 21: mod_base = OTHER; note = 2'-O-methylguanosine with phosphorothioate linkage
  modified_base 22: mod_base = OTHER; note = 2'-O-methylguanosine with phosphorothioate linkage
  modified_base 23: mod_base = OTHER; note = 2'-O-methyluridine
tcatcaagactttagcttctggt

SEQ ID NO: 986 - RNA, 23 nt, synthetic construct
  source 1..23: mol_type = other RNA
  modified_base 1: mod_base = OTHER; note = 5'-vinyl-phosphonate-2'-O-methyluridine with phosphorothioate linkage
  modified_base 2: mod_base = OTHER; note = 2'-fluoroguanosine with phosphorothioate linkage
  modified_base 3: mod_base = OTHER; note = 2'-O-methylcytidine
  modified_base 4: mod_base = OTHER; note = 2'-O-methyladenosine
  modified_base 5: mod_base = OTHER; note = 2'-O-methyluridine
  modified_base 6: mod_base = OTHER; note = 2'-fluorocytidine
  modified_base 7: mod_base = OTHER; note = 2'-O-methyladenosine
  modified_base 8: mod_base = OTHER; note = 2'-fluoroadenosine
  modified_base 9: mod_base = OTHER; note = 2'-fluoroguanosine
  modified_base 10: mod_base = OTHER; note = 2'-O-methyladenosine
  modified_base 11: mod_base = OTHER; note = 2'-O-methylcytidine
  modified_base 12: mod_base = OTHER; note = 2'-O-methyluridine
  modified_base 13: mod_base = OTHER; note = 2'-O-methyluridine
  modified_base 14: mod_base = OTHER; note = 2'-fluorouridine
  modified_base 15: mod_base = OTHER; note = 2'-O-methyladenosine
  modified_base 16: mod_base = OTHER; note = 2'-fluoroguanosine
  modified_base 17: mod_base = OTHER; note = 2'-O-methylcytidine
  modified_base 18: mod_base = OTHER; note = 2'-O-methyluridine
  modified_base 19: mod_base = OTHER; note = 2'-O-methyluridine
  modified_base 20: mod_base = OTHER; note = 2'-O-methylcytidine
  modified_base 21: mod_base = OTHER; note = 2'-O-methyluridine with phosphorothioate linkage
  modified_base 22: mod_base = OTHER; note = 2'-O-methylguanosine with phosphorothioate linkage
  modified_base 23: mod_base = OTHER; note = 2'-O-methylguanosine
tgcatcaagactttagcttctgg

SEQ ID NO: 987 - RNA, 23 nt, synthetic construct
  source 1..23: mol_type = other RNA
  modified_base 1: mod_base = OTHER; note = 5'-vinyl-phosphonate-2'-O-methyluridine with phosphorothioate linkage
  modified_base 2: mod_base = OTHER; note = 2'-fluoroguanosine with phosphorothioate linkage
  modified_base 3: mod_base = OTHER; note = 2'-O-methylguanosine
  modified_base 4: mod_base = OTHER; note = 2'-O-methylcytidine
  modified_base 5: mod_base = OTHER; note = 2'-O-methyladenosine
  modified_base 6: mod_base = OTHER; note = 2'-fluorouridine
  modified_base 7: mod_base = OTHER; note = 2'-O-methylcytidine
  modified_base 8: mod_base = OTHER; note = 2'-fluoroadenosine
  modified_base 9: mod_base = OTHER; note = 2'-fluoroadenosine
  modified_base 10: mod_base = OTHER; note = 2'-O-methylguanosine
  modified_base 11: mod_base = OTHER; note = 2'-O-methyladenosine
  modified_base 12: mod_base = OTHER; note = 2'-O-methylcytidine
  modified_base 13: mod_base = OTHER; note = 2'-O-methyluridine
  modified_base 14: mod_base = OTHER; note = 2'-fluorouridine
  modified_base 15: mod_base = OTHER; note = 2'-O-methyluridine
  modified_base 16: mod_base = OTHER; note = 2'-fluoroadenosine
  modified_base 17: mod_base = OTHER; note = 2'-O-methylguanosine
  modified_base 18: mod_base = OTHER; note = 2'-O-methylcytidine
  modified_base 19: mod_base = OTHER; note = 2'-O-methyluridine
  modified_base 20: mod_base = OTHER; note = 2'-O-methyluridine
  modified_base 21: mod_base = OTHER; note = 2'-O-methylcytidine with phosphorothioate linkage
  modified_base 22: mod_base = OTHER; note = 2'-O-methyluridine with phosphorothioate linkage
  modified_base 23: mod_base = OTHER; note = 2'-O-methylguanosine
tggcatcaagactttagcttctg

SEQ ID NO: 988 - RNA, 23 nt, synthetic construct
  source 1..23: mol_type = other RNA
  modified_base 1: mod_base = OTHER; note = 5'-vinyl-phosphonate-2'-O-methyluridine with phosphorothioate linkage
  modified_base 2: mod_base = OTHER; note = 2'-fluorouridine with phosphorothioate linkage
  modified_base 3: mod_base = OTHER; note = 2'-O-methylguanosine
  modified_base 4: mod_base = OTHER; note = 2'-O-methylguanosine
  modified_base 5: mod_base = OTHER; note = 2'-O-methylcytidine
  modified_base 6: mod_base = OTHER; note = 2'-fluoroadenosine
  modified_base 7: mod_base = OTHER; note = 2'-O-methyluridine
  modified_base 8: mod_base = OTHER; note = 2'-fluorocytidine
  modified_base 9: mod_base = OTHER; note = 2'-fluoroadenosine
  modified_base 10: mod_base = OTHER; note = 2'-O-methyladenosine
  modified_base 11: mod_base = OTHER; note = 2'-O-methylguanosine
  modified_base 12: mod_base = OTHER; note = 2'-O-methyladenosine
  modified_base 13: mod_base = OTHER; note = 2'-O-methylcytidine
  modified_base 14: mod_base = OTHER; note = 2'-fluorouridine
  modified_base 15: mod_base = OTHER; note = 2'-O-methyluridine
  modified_base 16: mod_base = OTHER; note = 2'-fluorouridine
  modified_base 17: mod_base = OTHER; note = 2'-O-methyladenosine
  modified_base 18: mod_base = OTHER; note = 2'-O-methylguanosine
  modified_base 19: mod_base = OTHER; note = 2'-O-methylcytidine
  modified_base 20: mod_base = OTHER; note = 2'-O-methyluridine
  modified_base 21: mod_base = OTHER; note = 2'-O-methyluridine with phosphorothioate linkage
  modified_base 22: mod_base = OTHER; note = 2'-O-methylcytidine with phosphorothioate linkage
  modified_base 23: mod_base = OTHER; note = 2'-O-methyluridine
ttggcatcaagactttagcttct

SEQ ID NO: 989 - RNA, 23 nt, synthetic construct
  source 1..23: mol_type = other RNA
  modified_base 1: mod_base = OTHER; note = 5'-vinyl-phosphonate-2'-O-methyluridine with phosphorothioate linkage
  modified_base 2: mod_base = OTHER; note = 2'-fluoroguanosine with phosphorothioate linkage
  modified_base 3: mod_base = OTHER; note = 2'-O-methyladenosine
  modified_base 4: mod_base = OTHER; note = 2'-O-methyluridine
  modified_base 5: mod_base = OTHER; note = 2'-O-methylguanosine
  modified_base 6: mod_base = OTHER; note = 2'-fluoroguanosine
  modified_base 7: mod_base = OTHER; note = 2'-O-methylcytidine
  modified_base 8: mod_base = OTHER; note = 2'-fluoroadenosine
  modified_base 9: mod_base = OTHER; note = 2'-fluorouridine
  modified_base 10: mod_base = OTHER; note = 2'-O-methylcytidine
  modified_base 11: mod_base = OTHER; note = 2'-O-methyladenosine
  modified_base 12: mod_base = OTHER; note = 2'-O-methyladenosine
  modified_base 13: mod_base = OTHER; note = 2'-O-methylguanosine
  modified_base 14: mod_base = OTHER; note = 2'-fluoroadenosine
  modified_base 15: mod_base = OTHER; note = 2'-O-methylcytidine
  modified_base 16: mod_base = OTHER; note = 2'-fluorouridine
  modified_base 17: mod_base = OTHER; note = 2'-O-methyluridine
  modified_base 18: mod_base = OTHER; note = 2'-O-methyluridine
  modified_base 19: mod_base = OTHER; note = 2'-O-methyladenosine
  modified_base 20: mod_base = OTHER; note = 2'-O-methylguanosine
  modified_base 21: mod_base = OTHER; note = 2'-O-methylcytidine with phosphorothioate linkage
  modified_base 22: mod_base = OTHER; note = 2'-O-methyluridine with phosphorothioate linkage
  modified_base 23: mod_base = OTHER; note = 2'-O-methyluridine
tgatggcatcaagactttagctt

SEQ ID NO: 990 - RNA, 23 nt, synthetic construct
  source 1..23: mol_type = other RNA
  modified_base 1: mod_base = OTHER; note = 5'-vinyl-phosphonate-2'-O-methyluridine with phosphorothioate linkage
  modified_base 2: mod_base = OTHER; note = 2'-fluoroguanosine with phosphorothioate linkage
  modified_base 3: mod_base = OTHER; note = 2'-O-methylguanosine
  modified_base 4: mod_base = OTHER; note = 2'-O-methyladenosine
  modified_base 5: mod_base = OTHER; note = 2'-O-methyluridine
  modified_base 6: mod_base = OTHER; note = 2'-fluoroguanosine
  modified_base 7: mod_base = OTHER; note = 2'-O-methyluridine
  modified_base 8: mod_base = OTHER; note = 2'-fluorocytidine
  modified_base 9: mod_base = OTHER; note = 2'-fluorocytidine
  modified_base 10: mod_base = OTHER; note = 2'-O-methyluridine
  modified_base 11: mod_base = OTHER; note = 2'-O-methyluridine
  modified_base 12: mod_base = OTHER; note = 2'-O-methyluridine
  modified_base 13: mod_base = OTHER; note = 2'-O-methylguanosine
  modified_base 14: mod_base = OTHER; note = 2'-fluoroadenosine
  modified_base 15: mod_base = OTHER; note = 2'-O-methyluridine
  modified_base 16: mod_base = OTHER; note = 2'-fluoroguanosine
  modified_base 17: mod_base = OTHER; note = 2'-O-methylguanosine
  modified_base 18: mod_base = OTHER; note = 2'-O-methylcytidine
  modified_base 19: mod_base = OTHER; note = 2'-O-methyladenosine
  modified_base 20: mod_base = OTHER; note = 2'-O-methyluridine
  modified_base 21: mod_base = OTHER; note = 2'-O-methylcytidine with phosphorothioate linkage
  modified_base 22: mod_base = OTHER; note = 2'-O-methyladenosine with phosphorothioate linkage
  modified_base 23: mod_base = OTHER; note = 2'-O-methyladenosine
tggatgtcctttgatggcatcaa

SEQ ID NO: 991 - RNA, 23 nt, synthetic construct
  source 1..23: mol_type = other RNA
  modified_base 1: mod_base = OTHER; note = 5'-vinyl-phosphonate-2'-O-methyluridine with phosphorothioate linkage
  modified_base 2: mod_base = OTHER; note = 2'-fluoroguanosine with phosphorothioate linkage
  modified_base 3: mod_base = OTHER; note = 2'-O-methylguanosine
  modified_base 4: mod_base = OTHER; note = 2'-O-methylguanosine
  modified_base 5: mod_base = OTHER; note = 2'-O-methyladenosine
  modified_base 6: mod_base = OTHER; note = 2'-fluorouridine
  modified_base 7: mod_base = OTHER; note = 2'-O-methylguanosine
  modified_base 8: mod_base = OTHER; note = 2'-fluorouridine
  modified_base 9: mod_base = OTHER; note = 2'-fluorocytidine
  modified_base 10: mod_base = OTHER; note = 2'-O-methylcytidine
  modified_base 11: mod_base = OTHER; note = 2'-O-methyluridine
  modified_base 12: mod_base = OTHER; note = 2'-O-methyluridine
  modified_base 13: mod_base = OTHER; note = 2'-O-methyluridine
  modified_base 14: mod_base = OTHER; note = 2'-fluoroguanosine
  modified_base 15: mod_base = OTHER; note = 2'-O-methyladenosine
  modified_base 16: mod_base = OTHER; note = 2'-fluorouridine
  modified_base 17: mod_base = OTHER; note = 2'-O-methylguanosine
  modified_base 18: mod_base = OTHER; note = 2'-O-methylguanosine
  modified_base 19: mod_base = OTHER; note = 2'-O-methylcytidine
  modified_base 20: mod_base = OTHER; note = 2'-O-methyladenosine
  modified_base 21: mod_base = OTHER; note = 2'-O-methyluridine with phosphorothioate linkage
  modified_base 22: mod_base = OTHER; note = 2'-O-methylcytidine with phosphorothioate linkage
  modified_base 23: mod_base = OTHER; note = 2'-O-methyladenosine
tgggatgtcctttgatggcatca

SEQ ID NO: 992 - RNA, 23 nt, synthetic construct
  source 1..23: mol_type = other RNA
  modified_base 1: mod_base = OTHER; note = 5'-vinyl-phosphonate-2'-O-methyluridine with phosphorothioate linkage
  modified_base 2: mod_base = OTHER; note = 2'-fluorocytidine with phosphorothioate linkage
  modified_base 3: mod_base = OTHER; note = 2'-O-methyladenosine
  modified_base 4: mod_base = OTHER; note = 2'-O-methylguanosine
  modified_base 5: mod_base = OTHER; note = 2'-O-methylguanosine
  modified_base 6: mod_base = OTHER; note = 2'-fluoroguanosine
  modified_base 7: mod_base = OTHER; note = 2'-O-methyladenosine
  modified_base 8: mod_base = OTHER; note = 2'-fluorouridine
  modified_base 9: mod_base = OTHER; note = 2'-fluoroguanosine
  modified_base 10: mod_base = OTHER; note = 2'-O-methyluridine
  modified_base 11: mod_base = OTHER; note = 2'-O-methylcytidine
  modified_base 12: mod_base = OTHER; note = 2'-O-methylcytidine
  modified_base 13: mod_base = OTHER; note = 2'-O-methyluridine
  modified_base 14: mod_base = OTHER; note = 2'-fluorouridine
  modified_base 15: mod_base = OTHER; note = 2'-O-methyluridine
  modified_base 16: mod_base = OTHER; note = 2'-fluoroguanosine
  modified_base 17: mod_base = OTHER; note = 2'-O-methyladenosine
  modified_base 18: mod_base = OTHER; note = 2'-O-methyluridine
  modified_base 19: mod_base = OTHER; note = 2'-O-methylguanosine
  modified_base 20: mod_base = OTHER; note = 2'-O-methylguanosine
  modified_base 21: mod_base = OTHER; note = 2'-O-methylcytidine with phosphorothioate linkage
  modified_base 22: mod_base = OTHER; note = 2'-O-methyladenosine with phosphorothioate linkage
  modified_base 23: mod_base = OTHER; note = 2'-O-methyluridine
tcagggatgtcctttgatggcat

SEQ ID NO: 993 - RNA, 23 nt, synthetic construct
  source 1..23: mol_type = other RNA
  modified_base 1: mod_base = OTHER; note = 5'-vinyl-phosphonate-2'-O-methyluridine with phosphorothioate linkage
  modified_base 2: mod_base = OTHER; note = 2'-fluorouridine with phosphorothioate linkage
  modified_base 3: mod_base = OTHER; note = 2'-O-methyladenosine
  modified_base 4: mod_base = OTHER; note = 2'-O-methylguanosine
  modified_base 5: mod_base = OTHER; note = 2'-O-methyluridine
  modified_base 6: mod_base = OTHER; note = 2'-fluoroguanosine
  modified_base 7: mod_base = OTHER; note = 2'-O-methylguanosine
  modified_base 8: mod_base = OTHER; note = 2'-fluoroadenosine
  modified_base 9: mod_base = OTHER; note = 2'-fluorocytidine
  modified_base 10: mod_base = OTHER; note = 2'-O-methylguanosine
  modified_base 11: mod_base = OTHER; note = 2'-O-methyluridine
  modified_base 12: mod_base = OTHER; note = 2'-O-methylguanosine
  modified_base 13: mod_base = OTHER; note = 2'-O-methyladenosine
  modified_base 14: mod_base = OTHER; note = 2'-fluorocytidine
  modified_base 15: mod_base = OTHER; note = 2'-O-methyladenosine
  modified_base 16: mod_base = OTHER; note = 2'-fluoroguanosine
  modified_base 17: mod_base = OTHER; note = 2'-O-methyladenosine
  modified_base 18: mod_base = OTHER; note = 2'-O-methylguanosine
  modified_base 19: mod_base = OTHER; note = 2'-O-methyladenosine
  modified_base 20: mod_base = OTHER; note = 2'-O-methyluridine
  modified_base 21: mod_base = OTHER; note = 2'-O-methylguanosine with phosphorothioate linkage
  modified_base 22: mod_base = OTHER; note = 2'-O-methyluridine with phosphorothioate linkage
  modified_base 23: mod_base = OTHER; note = 2'-O-methylguanosine
ttagtggacgtgacagagatgtg

SEQ ID NO: 994 - RNA, 23 nt, synthetic construct
  source 1..23: mol_type = other RNA
  modified_base 1: mod_base = OTHER; note = 5'-vinyl-phosphonate-2'-O-methyluridine with phosphorothioate linkage
  modified_base 2: mod_base = OTHER; note = 2'-fluorouridine with phosphorothioate linkage
  modified_base 3: mod_base = OTHER; note = 2'-O-methyluridine
  modified_base 4: mod_base = OTHER; note = 2'-O-methyladenosine
  modified_base 5: mod_base = OTHER; note = 2'-O-methylguanosine
  modified_base 6: mod_base = OTHER; note = 2'-fluorouridine
  modified_base 7: mod_base = OTHER; note = 2'-O-methylguanosine
  modified_base 8: mod_base = OTHER; note = 2'-fluoroguanosine
  modified_base 9: mod_base = OTHER; note = 2'-fluoroadenosine
  modified_base 10: mod_base = OTHER; note = 2'-O-methylcytidine
  modified_base 11: mod_base = OTHER; note = 2'-O-methylguanosine
  modified_base 12: mod_base = OTHER; note = 2'-O-methyluridine
  modified_base 13: mod_base = OTHER; note = 2'-O-methylguanosine
  modified_base 14: mod_base = OTHER; note = 2'-fluoroadenosine
  modified_base 15: mod_base = OTHER; note = 2'-O-methylcytidine
  modified_base 16: mod_base = OTHER; note = 2'-fluoroadenosine
  modified_base 17: mod_base = OTHER; note = 2'-O-methylguanosine
  modified_base 18: mod_base = OTHER; note = 2'-O-methyladenosine
  modified_base 19: mod_base = OTHER; note = 2'-O-methylguanosine
  modified_base 20: mod_base = OTHER; note = 2'-O-methyladenosine
  modified_base 21: mod_base = OTHER; note = 2'-O-methyluridine with phosphorothioate linkage
  modified_base 22: mod_base = OTHER; note = 2'-O-methylguanosine with phosphorothioate linkage
  modified_base 23: mod_base = OTHER; note = 2'-O-methyluridine
tttagtggacgtgacagagatgt

SEQ ID NO: 995 - RNA, 23 nt, synthetic construct
  source 1..23: mol_type = other RNA
  modified_base 1: mod_base = OTHER; note = 5'-vinyl-phosphonate-2'-O-methyluridine with phosphorothioate linkage
  modified_base 2: mod_base = OTHER; note = 2'-fluoroadenosine with phosphorothioate linkage
  modified_base 3: mod_base = OTHER; note = 2'-O-methyluridine
  modified_base 4: mod_base = OTHER; note = 2'-O-methyluridine
  modified_base 5: mod_base = OTHER; note = 2'-O-methyladenosine
  modified_base 6: mod_base = OTHER; note = 2'-fluoroguanosine
  modified_base 7: mod_base = OTHER; note = 2'-O-methyluridine
  modified_base 8: mod_base = OTHER; note = 2'-fluoroguanosine
  modified_base 9: mod_base = OTHER; note = 2'-fluoroguanosine
  modified_base 10: mod_base = OTHER; note = 2'-O-methyladenosine
  modified_base 11: mod_base = OTHER; note = 2'-O-methylcytidine
  modified_base 12: mod_base = OTHER; note = 2'-O-methylguanosine
  modified_base 13: mod_base = OTHER; note = 2'-O-methyluridine
  modified_base 14: mod_base = OTHER; note = 2'-fluoroguanosine
  modified_base 15: mod_base = OTHER; note = 2'-O-methyladenosine
  modified_base 16: mod_base = OTHER; note = 2'-fluorocytidine
  modified_base 17: mod_base = OTHER; note = 2'-O-methyladenosine
  modified_base 18: mod_base = OTHER; note = 2'-O-methylguanosine
  modified_base 19: mod_base = OTHER; note = 2'-O-methyladenosine
  modified_base 20: mod_base = OTHER; note = 2'-O-methylguanosine
  modified_base 21: mod_base = OTHER; note = 2'-O-methyladenosine with phosphorothioate linkage
  modified_base 22: mod_base = OTHER; note = 2'-O-methyluridine with phosphorothioate linkage
  modified_base 23: mod_base = OTHER; note = 2'-O-methylguanosine
tattagtggacgtgacagagatg

SEQ ID NO: 996 - RNA, 23 nt, synthetic construct
  source 1..23: mol_type = other RNA
  modified_base 1: mod_base = OTHER; note = 5'-vinyl-phosphonate-2'-O-methyluridine with phosphorothioate linkage
  modified_base 2: mod_base = OTHER; note = 2'-fluoroguanosine with phosphorothioate linkage
  modified_base 3: mod_base = OTHER; note = 2'-O-methyladenosine
  modified_base 4: mod_base = OTHER; note = 2'-O-methyluridine
  modified_base 5: mod_base = OTHER; note = 2'-O-methyluridine
  modified_base 6: mod_base = OTHER; note = 2'-fluoroadenosine
  modified_base 7: mod_base = OTHER; note = 2'-O-methylguanosine
  modified_base 8: mod_base = OTHER; note = 2'-fluorouridine
  modified_base 9: mod_base = OTHER; note = 2'-fluoroguanosine
  modified_base 10: mod_base = OTHER; note = 2'-O-methylguanosine
  modified_base 11: mod_base = OTHER; note = 2'-O-methyladenosine
  modified_base 12: mod_base = OTHER; note = 2'-O-methylcytidine
  modified_base 13: mod_base = OTHER; note = 2'-O-methylguanosine
  modified_base 14: mod_base = OTHER; note = 2'-fluorouridine
  modified_base 15: mod_base = OTHER; note = 2'-O-methylguanosine
  modified_base 16: mod_base = OTHER; note = 2'-fluoroadenosine
  modified_base 17: mod_base = OTHER; note = 2'-O-methylcytidine
  modified_base 18: mod_base = OTHER; note = 2'-O-methyladenosine
  modified_base 19: mod_base = OTHER; note = 2'-O-methylguanosine
  modified_base 20: mod_base = OTHER; note = 2'-O-methyladenosine
  modified_base 21: mod_base = OTHER; note = 2'-O-methylguanosine with phosphorothioate linkage
  modified_base 22: mod_base = OTHER; note = 2'-O-methyladenosine with phosphorothioate linkage
  modified_base 23: mod_base = OTHER; note = 2'-O-methyluridine
tgattagtggacgtgacagagat

SEQ ID NO: 997 - RNA, 23 nt, synthetic construct
  source 1..23: mol_type = other RNA
  modified_base 1: mod_base = OTHER; note = 5'-vinyl-phosphonate-2'-O-methyluridine with phosphorothioate linkage
  modified_base 2: mod_base = OTHER; note = 2'-fluorocytidine with phosphorothioate linkage
  modified_base 3: mod_base = OTHER; note = 2'-O-methylguanosine
  modified_base 4: mod_base = OTHER; note = 2'-O-methyladenosine
  modified_base 5: mod_base = OTHER; note = 2'-O-methyluridine
  modified_base 6: mod_base = OTHER; note = 2'-fluorouridine
  modified_base 7: mod_base = OTHER; note = 2'-O-methyladenosine
  modified_base 8: mod_base = OTHER; note = 2'-fluoroguanosine
  modified_base 9: mod_base = OTHER; note = 2'-fluorouridine
  modified_base 10: mod_base = OTHER; note = 2'-O-methylguanosine
  modified_base 11: mod_base = OTHER; note = 2'-O-methylguanosine
  modified_base 12: mod_base = OTHER; note = 2'-O-methyladenosine
  modified_base 13: mod_base = OTHER; note = 2'-O-methylcytidine
  modified_base 14: mod_base = OTHER; note = 2'-fluoroguanosine
  modified_base 15: mod_base = OTHER; note = 2'-O-methyluridine
  modified_base 16: mod_base = OTHER; note = 2'-fluoroguanosine
  modified_base 17: mod_base = OTHER; note = 2'-O-methyladenosine
  modified_base 18: mod_base = OTHER; note = 2'-O-methylcytidine
  modified_base 19: mod_base = OTHER; note = 2'-O-methyladenosine
  modified_base 20: mod_base = OTHER; note = 2'-O-methylguanosine
  modified_base 21: mod_base = OTHER; note = 2'-O-methyladenosine with phosphorothioate linkage
  modified_base 22: mod_base = OTHER; note = 2'-O-methylguanosine with phosphorothioate linkage
  modified_base 23: mod_base = OTHER; note = 2'-O-methyladenosine
tcgattagtggacgtgacagaga

SEQ ID NO: 998 - RNA, 23 nt, synthetic construct
  source 1..23: mol_type = other RNA
  modified_base 1: mod_base = OTHER; note = 5'-vinyl-phosphonate-2'-O-methyluridine with phosphorothioate linkage
  modified_base 2: mod_base = OTHER; note = 2'-fluorocytidine with phosphorothioate linkage
  modified_base 3: mod_base = OTHER; note = 2'-O-methylcytidine
  modified_base 4: mod_base = OTHER; note = 2'-O-methylguanosine
  modified_base 5: mod_base = OTHER; note = 2'-O-methyladenosine
  modified_base 6: mod_base = OTHER; note = 2'-fluorouridine
  modified_base 7: mod_base = OTHER; note = 2'-O-methyluridine
  modified_base 8: mod_base = OTHER; note = 2'-fluoroadenosine
  modified_base 9: mod_base = OTHER; note = 2'-fluoroguanosine
  modified_base 10: mod_base = OTHER; note = 2'-O-methyluridine
  modified_base 11: mod_base = OTHER; note = 2'-O-methylguanosine
  modified_base 12: mod_base = OTHER; note = 2'-O-methylguanosine
  modified_base 13: mod_base = OTHER; note = 2'-O-methyladenosine
  modified_base 14: mod_base = OTHER; note = 2'-fluorocytidine
  modified_base 15: mod_base = OTHER; note = 2'-O-methylguanosine
  modified_base 16: mod_base = OTHER; note = 2'-fluorouridine
  modified_base 17: mod_base = OTHER; note = 2'-O-methylguanosine
  modified_base 18: mod_base = OTHER; note = 2'-O-methyladenosine
  modified_base 19: mod_base = OTHER; note = 2'-O-methylcytidine
  modified_base 20: mod_base = OTHER; note = 2'-O-methyladenosine
  modified_base 21: mod_base = OTHER; note = 2'-O-methylguanosine with phosphorothioate linkage
  modified_base 22: mod_base = OTHER; note = 2'-O-methyladenosine with phosphorothioate linkage
  modified_base 23: mod_base = OTHER; note = 2'-O-methylguanosine
tccgattagtggacgtgacagag

SEQ ID NO: 999 - RNA, 23 nt, synthetic construct
  source 1..23: mol_type = other RNA
  modified_base 1: mod_base = OTHER; note = 5'-vinyl-phosphonate-2'-O-methyluridine with phosphorothioate linkage
  modified_base 2: mod_base = OTHER; note = 2'-fluoroguanosine with phosphorothioate linkage
  modified_base 3: mod_base = OTHER; note = 2'-O-methylcytidine
  modified_base 4: mod_base = OTHER; note = 2'-O-methylcytidine
  modified_base 5: mod_base = OTHER; note = 2'-O-methylguanosine
  modified_base 6: mod_base = OTHER; note = 2'-fluoroadenosine
  modified_base 7: mod_base = OTHER; note = 2'-O-methyluridine
  modified_base 8: mod_base = OTHER; note = 2'-fluorouridine
  modified_base 9: mod_base = OTHER; note = 2'-fluoroadenosine
  modified_base 10: mod_base = OTHER; note = 2'-O-methylguanosine
  modified_base 11: mod_base = OTHER; note = 2'-O-methyluridine
  modified_base 12: mod_base = OTHER; note = 2'-O-methylguanosine
  modified_base 13: mod_base = OTHER; note = 2'-O-methylguanosine
  modified_base 14: mod_base = OTHER; note = 2'-fluoroadenosine
  modified_base 15: mod_base = OTHER; note = 2'-O-methylcytidine
  modified_base 16: mod_base = OTHER; note = 2'-fluoroguanosine
  modified_base 17: mod_base = OTHER; note = 2'-O-methyluridine
  modified_base 18: mod_base = OTHER; note = 2'-O-methylguanosine
  modified_base 19: mod_base = OTHER; note = 2'-O-methyladenosine
  modified_base 20: mod_base = OTHER; note = 2'-O-methylcytidine
  modified_base 21: mod_base = OTHER; note = 2'-O-methyladenosine with phosphorothioate linkage
  modified_base 22: mod_base = OTHER; note = 2'-O-methylguanosine with phosphorothioate linkage
  modified_base 23: mod_base = OTHER; note = 2'-O-methyladenosine
tgccgattagtggacgtgacaga

SEQ ID NO: 1000 - RNA, 23 nt, synthetic construct
  source 1..23: mol_type = other RNA
  modified_base 1: mod_base = OTHER; note = 5'-vinyl-phosphonate-2'-O-methyluridine with phosphorothioate linkage
  modified_base 2: mod_base = OTHER; note = 2'-fluorouridine with phosphorothioate linkage
  modified_base 3: mod_base = OTHER; note = 2'-O-methylguanosine
  modified_base 4: mod_base = OTHER; note = 2'-O-methylcytidine
  modified_base 5: mod_base = OTHER; note = 2'-O-methylcytidine
  modified_base 6: mod_base = OTHER; note = 2'-fluoroguanosine
  modified_base 7: mod_base = OTHER; note = 2'-O-methyladenosine
  modified_base 8: mod_base = OTHER; note = 2'-fluorouridine
  modified_base 9: mod_base = OTHER; note = 2'-fluorouridine
  modified_base 10: mod_base = OTHER; note = 2'-O-methyladenosine
  modified_base 11: mod_base = OTHER; note = 2'-O-methylguanosine
  modified_base 12: mod_base = OTHER; note = 2'-O-methyluridine
  modified_base 13: mod_base = OTHER; note = 2'-O-methylguanosine
  modified_base 14: mod_base = OTHER; note = 2'-fluoroguanosine
  modified_base 15: mod_base = OTHER; note = 2'-O-methyladenosine
  modified_base 16: mod_base = OTHER; note = 2'-fluorocytidine
  modified_base 17: mod_base = OTHER; note = 2'-O-methylguanosine
  modified_base 18: mod_base = OTHER; note = 2'-O-methyluridine
  modified_base 19: mod_base = OTHER; note = 2'-O-methylguanosine
  modified_base 20: mod_base = OTHER; note = 2'-O-methyladenosine
  modified_base 21: mod_base = OTHER; note = 2'-O-methylcytidine with phosphorothioate linkage
  modified_base 22: mod_base = OTHER; note = 2'-O-methyladenosine with phosphorothioate linkage
  modified_base 23: mod_base = OTHER; note = 2'-O-methylguanosine
ttgccgattagtggacgtgacag

SEQ ID NO: 1001 - RNA, 23 nt, synthetic construct
  source 1..23: mol_type = other RNA
  modified_base 1: mod_base = OTHER; note = 5'-vinyl-phosphonate-2'-O-methyluridine with phosphorothioate linkage
  modified_base 2: mod_base = OTHER; note = 2'-fluorouridine with phosphorothioate linkage
  modified_base 3: mod_base = OTHER; note = 2'-O-methyluridine
  modified_base 4: mod_base = OTHER; note = 2'-O-methylguanosine
  modified_base 5: mod_base = OTHER; note = 2'-O-methylcytidine
  modified_base 6: mod_base = OTHER; note = 2'-fluorocytidine
  modified_base 7: mod_base = OTHER; note = 2'-O-methylguanosine
  modified_base 8: mod_base = OTHER; note = 2'-fluoroadenosine
  modified_base 9: mod_base = OTHER; note = 2'-fluorouridine
  modified_base 10: mod_base = OTHER; note = 2'-O-methyluridine
  modified_base 11: mod_base = OTHER; note = 2'-O-methyladenosine
  modified_base 12: mod_base = OTHER; note = 2'-O-methylguanosine
  modified_base 13: mod_base = OTHER; note = 2'-O-methyluridine
  modified_base 14: mod_base = OTHER; note = 2'-fluoroguanosine
  modified_base 15: mod_base = OTHER; note = 2'-O-methylguanosine
  modified_base 16: mod_base = OTHER; note = 2'-fluoroadenosine
  modified_base 17: mod_base = OTHER; note = 2'-O-methylcytidine
  modified_base 18: mod_base = OTHER; note = 2'-O-methylguanosine
  modified_base 19: mod_base = OTHER; note = 2'-O-methyluridine
  modified_base 20: mod_base = OTHER; note = 2'-O-methylguanosine
  modified_base 21: mod_base = OTHER; note = 2'-O-methyladenosine with phosphorothioate linkage
  modified_base 22: mod_base = OTHER; note = 2'-O-methylcytidine with phosphorothioate linkage
  modified_base 23: mod_base = OTHER; note = 2'-O-methyladenosine
tttgccgattagtggacgtgaca

SEQ ID NO: 1002 - RNA, 23 nt, synthetic construct
  source 1..23: mol_type = other RNA
  modified_base 1: mod_base = OTHER; note = 5'-vinyl-phosphonate-2'-O-methyluridine with phosphorothioate linkage
  modified_base 2: mod_base = OTHER; note = 2'-fluorouridine with phosphorothioate linkage
  modified_base 3: mod_base = OTHER; note = 2'-O-methyluridine
  modified_base 4: mod_base = OTHER; note = 2'-O-methyluridine
  modified_base 5: mod_base = OTHER; note = 2'-O-methylguanosine
  modified_base 6: mod_base = OTHER; note = 2'-fluorocytidine
  modified_base 7: mod_base = OTHER; note = 2'-O-methylcytidine
  modified_base 8: mod_base = OTHER; note = 2'-fluoroguanosine
  modified_base 9: mod_base = OTHER; note = 2'-fluoroadenosine
  modified_base 10: mod_base = OTHER; note = 2'-O-methyluridine
  modified_base 11: mod_base = OTHER; note = 2'-O-methyluridine
  modified_base 12: mod_base = OTHER; note = 2'-O-methyladenosine
  modified_base 13: mod_base = OTHER; note = 2'-O-methylguanosine
  modified_base 14: mod_base = OTHER; note = 2'-fluorouridine
  modified_base 15: mod_base = OTHER; note = 2'-O-methylguanosine
  modified_base 16: mod_base = OTHER; note = 2'-fluoroguanosine
  modified_base 17: mod_base = OTHER; note = 2'-O-methyladenosine
  modified_base 18: mod_base = OTHER; note = 2'-O-methylcytidine
  modified_base 19: mod_base = OTHER; note = 2'-O-methylguanosine
  modified_base 20: mod_base = OTHER; note = 2'-O-methyluridine
  modified_base 21: mod_base = OTHER; note = 2'-O-methylguanosine with phosphorothioate linkage
  modified_base 22: mod_base = OTHER; note = 2'-O-methyladenosine with phosphorothioate linkage
  modified_base 23: mod_base = OTHER; note = 2'-O-methylcytidine
ttttgccgattagtggacgtgac

SEQ ID NO: 1003 - RNA, 23 nt, synthetic construct
  source 1..23: mol_type = other RNA
  modified_base 1: mod_base = OTHER; note = 5'-vinyl-phosphonate-2'-O-methyluridine with phosphorothioate linkage
  modified_base 2: mod_base = OTHER; note = 2'-fluorocytidine with phosphorothioate linkage
  modified_base 3: mod_base = OTHER; note = 2'-O-methyluridine
  modified_base 4: mod_base = OTHER; note = 2'-O-methyluridine
  modified_base 5: mod_base = OTHER; note = 2'-O-methyluridine
  modified_base 6: mod_base = OTHER; note = 2'-fluorouridine
  modified_base 7: mod_base = OTHER; note = 2'-O-methylguanosine
  modified_base 8: mod_base = OTHER; note = 2'-fluorocytidine
  modified_base 9: mod_base = OTHER; note = 2'-fluorocytidine
  modified_base 10: mod_base = OTHER; note = 2'-O-methylguanosine
  modified_base 11: mod_base = OTHER; note = 2'-O-methyladenosine
  modified_base 12: mod_base = OTHER; note = 2'-O-methyluridine
  modified_base 13: mod_base = OTHER; note = 2'-O-methyluridine
  modified_base 14: mod_base = OTHER; note = 2'-fluoroadenosine
  modified_base 15: mod_base = OTHER; note = 2'-O-methylguanosine
  modified_base 16: mod_base = OTHER; note = 2'-fluorouridine
  modified_base 17: mod_base = OTHER; note = 2'-O-methylguanosine
  modified_base 18: mod_base = OTHER; note = 2'-O-methylguanosine
  modified_base 19: mod_base = OTHER; note = 2'-O-methyladenosine
  modified_base 20: mod_base = OTHER; note = 2'-O-methylcytidine
  modified_base 21: mod_base = OTHER; note = 2'-O-methylguanosine with phosphorothioate linkage
  modified_base 22: mod_base = OTHER; note = 2'-O-methyluridine with phosphorothioate linkage
  modified_base 23: mod_base = OTHER; note = 2'-O-methylguanosine
tcttttgccgattagtggacgtg

SEQ ID NO: 1004 - RNA, 23 nt, synthetic construct
  source 1..23: mol_type = other RNA
  modified_base 1: mod_base = OTHER; note = 5'-vinyl-phosphonate-2'-O-methyluridine with phosphorothioate linkage
  modified_base 2: mod_base = OTHER; note = 2'-fluorocytidine with phosphorothioate linkage
  modified_base 3: mod_base = OTHER; note = 2'-O-methylcytidine
  modified_base 4: mod_base = OTHER; note = 2'-O-methyluridine
  modified_base 5: mod_base = OTHER; note = 2'-O-methyluridine
  modified_base 6: mod_base = OTHER; note = 2'-fluorouridine
  modified_base 7: mod_base = OTHER; note = 2'-O-methyluridine
  modified_base 8: mod_base = OTHER; note = 2'-fluoroguanosine
  modified_base 9: mod_base = OTHER; note = 2'-fluorocytidine
  modified_base 10: mod_base = OTHER; note = 2'-O-methylcytidine
  modified_base 11: mod_base = OTHER; note = 2'-O-methylguanosine
  modified_base 12: mod_base = OTHER; note = 2'-O-methyladenosine
  modified_base 13: mod_base = OTHER; note = 2'-O-methyluridine
  modified_base 14: mod_base = OTHER; note = 2'-fluorouridine
  modified_base 15: mod_base = OTHER; note = 2'-O-methyladenosine
  modified_base 16: mod_base = OTHER; note = 2'-fluoroguanosine
  modified_base 17: mod_base = OTHER; note = 2'-O-methyluridine
  modified_base 18: mod_base = OTHER; note = 2'-O-methylguanosine
  modified_base 19: mod_base = OTHER; note = 2'-O-methylguanosine
  modified_base 20: mod_base = OTHER; note = 2'-O-methyladenosine
  modified_base 21: mod_base = OTHER; note = 2'-O-methylcytidine with phosphorothioate linkage
  modified_base 22: mod_base = OTHER; note = 2'-O-methylguanosine with phosphorothioate linkage
  modified_base 23: mod_base = OTHER; note = 2'-O-methyluridine
tccttttgccgattagtggacgt

SEQ ID NO: 1005 - RNA, 23 nt, synthetic construct
  source 1..23: mol_type = other RNA
  modified_base 1: mod_base = OTHER; note = 5'-vinyl-phosphonate-2'-O-methyluridine with phosphorothioate linkage
  modified_base 2: mod_base = OTHER; note = 2'-fluorouridine with phosphorothioate linkage
  modified_base 3: mod_base = OTHER; note = 2'-O-methylcytidine
  modified_base 4: mod_base = OTHER; note = 2'-O-methylcytidine
  modified_base 5: mod_base = OTHER; note = 2'-O-methyluridine
  modified_base 6: mod_base = OTHER; note = 2'-fluorouridine
  modified_base 7: mod_base = OTHER; note = 2'-O-methyluridine
  modified_base 8: mod_base = OTHER; note = 2'-fluorouridine
  modified_base 9: mod_base = OTHER; note = 2'-fluoroguanosine
  modified_base 10: mod_base = OTHER; note = 2'-O-methylcytidine
  modified_base 11: mod_base = OTHER; note = 2'-O-methylcytidine
  modified_base 12: mod_base = OTHER; note = 2'-O-methylguanosine
  modified_base 13: mod_base = OTHER; note = 2'-O-methyladenosine
  modified_base 14: mod_base = OTHER; note = 2'-fluorouridine
  modified_base 15: mod_base = OTHER; note = 2'-O-methyluridine
  modified_base 16: mod_base = OTHER; note = 2'-fluoroadenosine
  modified_base 17: mod_base = OTHER; note = 2'-O-methylguanosine
  modified_base 18: mod_base = OTHER; note = 2'-O-methyluridine
  modified_base 19: mod_base = OTHER; note = 2'-O-methylguanosine
  modified_base 20: mod_base = OTHER; note = 2'-O-methylguanosine
  modified_base 21: mod_base = OTHER; note = 2'-O-methyladenosine with phosphorothioate linkage
  modified_base 22: mod_base = OTHER; note = 2'-O-methylcytidine with phosphorothioate linkage
  modified_base 23: mod_base = OTHER; note = 2'-O-methylguanosine
ttccttttgccgattagtggacg

SEQ ID NO: 1006 - RNA, 23 nt, synthetic construct
  source 1..23: mol_type = other RNA
  modified_base 1: mod_base = OTHER; note = 5'-vinyl-phosphonate-2'-O-methyluridine with phosphorothioate linkage
  modified_base 2: mod_base = OTHER; note = 2'-fluorocytidine with phosphorothioate linkage
  modified_base 3: mod_base = OTHER; note = 2'-O-methyluridine
  modified_base 4: mod_base = OTHER; note = 2'-O-methylcytidine
  modified_base 5: mod_base = OTHER; note = 2'-O-methylcytidine
  modified_base 6: mod_base = OTHER; note = 2'-fluorouridine
  modified_base 7: mod_base = OTHER; note = 2'-O-methyluridine
  modified_base 8: mod_base = OTHER; note = 2'-fluorouridine
  modified_base 9: mod_base = OTHER; note = 2'-fluorouridine
  modified_base 10: mod_base = OTHER; note = 2'-O-methylguanosine
  modified_base 11: mod_base = OTHER; note = 2'-O-methylcytidine
  modified_base 12: mod_base = OTHER; note = 2'-O-methylcytidine
  modified_base 13: mod_base = OTHER; note = 2'-O-methylguanosine
  modified_base 14: mod_base = OTHER; note = 2'-fluoroadenosine
  modified_base 15: mod_base = OTHER; note = 2'-O-methyluridine
  modified_base 16: mod_base = OTHER; note = 2'-fluorouridine
  modified_base 17: mod_base = OTHER; note = 2'-O-methyladenosine
  modified_base 18: mod_base = OTHER; note = 2'-O-methylguanosine
  modified_base 19: mod_base = OTHER; note = 2'-O-methyluridine
  modified_base 20: mod_base = OTHER; note = 2'-O-methylguanosine
  modified_base 21: mod_base = OTHER; note = 2'-O-methylguanosine with phosphorothioate linkage
  modified_base 22: mod_base = OTHER; note = 2'-O-methyladenosine with phosphorothioate linkage
  modified_base 23: mod_base = OTHER; note = 2'-O-methylcytidine
tctccttttgccgattagtggac

SEQ ID NO: 1007 - RNA, 23 nt, synthetic construct
  source 1..23: mol_type = other RNA
  modified_base 1: mod_base = OTHER; note = 5'-vinyl-phosphonate-2'-O-methyluridine with phosphorothioate linkage
  modified_base 2: mod_base = OTHER; note = 2'-fluorouridine with phosphorothioate linkage
  modified_base 3: mod_base = OTHER; note = 2'-O-methylcytidine
  modified_base 4: mod_base = OTHER; note = 2'-O-methyluridine
  modified_base 5: mod_base = OTHER; note = 2'-O-methylcytidine
  modified_base 6: mod_base = OTHER; note = 2'-fluorocytidine
  modified_base 7: mod_base = OTHER; note = 2'-O-methyluridine
  modified_base 8: mod_base = OTHER; note = 2'-fluorouridine
  modified_base 9: mod_base = OTHER; note = 2'-fluorouridine
  modified_base 10: mod_base = OTHER; note = 2'-O-methyluridine
  modified_base 11: mod_base = OTHER; note = 2'-O-methylguanosine
  modified_base 12: mod_base = OTHER; note = 2'-O-methylcytidine
  modified_base 13: mod_base = OTHER; note = 2'-O-methylcytidine
  modified_base 14: mod_base = OTHER; note = 2'-fluoroguanosine
  modified_base 15: mod_base = OTHER; note = 2'-O-methyladenosine
  modified_base 16: mod_base = OTHER; note = 2'-fluorouridine
  modified_base 17: mod_base = OTHER; note = 2'-O-methyluridine
  modified_base 18: mod_base = OTHER; note = 2'-O-methyladenosine
  modified_base 19: mod_base = OTHER; note = 2'-O-methylguanosine
  modified_base 20: mod_base = OTHER; note = 2'-O-methyluridine
  modified_base 21: mod_base = OTHER; note = 2'-O-methylguanosine with phosphorothioate linkage
  modified_base 22: mod_base = OTHER; note = 2'-O-methylguanosine with phosphorothioate linkage
  modified_base 23: mod_base = OTHER; note = 2'-O-methyladenosine
ttctccttttgccgattagtgga

SEQ ID NO: 1008 - RNA, 23 nt, synthetic construct
  source 1..23: mol_type = other RNA
  modified_base 1: mod_base = OTHER; note = 5'-vinyl-phosphonate-2'-O-methyluridine with phosphorothioate linkage
  modified_base 2: mod_base = OTHER; note = 2'-fluorouridine with phosphorothioate linkage
  modified_base 3: mod_base = OTHER; note = 2'-O-methyluridine
  modified_base 4: mod_base = OTHER; note = 2'-O-methylcytidine
  modified_base 5: mod_base = OTHER; note = 2'-O-methyluridine
  modified_base 6: mod_base = OTHER; note = 2'-fluorocytidine
  modified_base 7: mod_base = OTHER; note = 2'-O-methylcytidine
  modified_base 8: mod_base = OTHER; note = 2'-fluorouridine
  modified_base 9: mod_base = OTHER; note = 2'-fluorouridine
  modified_base 10: mod_base = OTHER; note = 2'-O-methyluridine
  modified_base 11: mod_base = OTHER; note = 2'-O-methyluridine
  modified_base 12: mod_base = OTHER; note = 2'-O-methylguanosine
  modified_base 13: mod_base = OTHER; note = 2'-O-methylcytidine
  modified_base 14: mod_base = OTHER; note = 2'-fluorocytidine
  modified_base 15: mod_base = OTHER; note = 2'-O-methylguanosine
  modified_base 16: mod_base = OTHER; note = 2'-fluoroadenosine
  modified_base 17: mod_base = OTHER; note = 2'-O-methyluridine
  modified_base 18: mod_base = OTHER; note = 2'-O-methyluridine
  modified_base 19: mod_base = OTHER; note = 2'-O-methyladenosine
  modified_base 20: mod_base = OTHER; note = 2'-O-methylguanosine
  modified_base 21: mod_base = OTHER; note = 2'-O-methyluridine with phosphorothioate linkage
  modified_base 22: mod_base = OTHER; note = 2'-O-methylguanosine with phosphorothioate linkage
  modified_base 23: mod_base = OTHER; note = 2'-O-methylguanosine
tttctccttttgccgattagtgg

SEQ ID NO: 1009 - RNA, 23 nt, synthetic construct
  source 1..23: mol_type = other RNA
  modified_base 1: mod_base = OTHER; note = 5'-vinyl-phosphonate-2'-O-methyluridine with phosphorothioate linkage
  modified_base 2: mod_base = OTHER; note = 2'-fluorocytidine with phosphorothioate linkage
  modified_base 3: mod_base = OTHER; note = 2'-O-methyladenosine
  modified_base 4: mod_base = OTHER; note = 2'-O-methylcytidine
  modified_base 5: mod_base = OTHER; note = 2'-O-methyladenosine
  modified_base 6: mod_base = OTHER; note = 2'-fluorocytidine
  modified_base 7: mod_base = OTHER; note = 2'-O-methyluridine
  modified_base 8: mod_base = OTHER; note = 2'-fluorouridine
  modified_base 9: mod_base = OTHER; note = 2'-fluoroadenosine
  modified_base 10: mod_base = OTHER; note = 2'-O-methylguanosine
  modified_base 11: mod_base = OTHER; note = 2'-O-methylguanosine
  modified_base 12: mod_base = OTHER; note = 2'-O-methyluridine
  modified_base 13: mod_base = OTHER; note = 2'-O-methylcytidine
  modified_base 14: mod_base = OTHER; note = 2'-fluoroadenosine
  modified_base 15: mod_base = OTHER; note = 2'-O-methyluridine
  modified_base 16: mod_base = OTHER; note = 2'-fluorocytidine
  modified_base 17: mod_base = OTHER; note = 2'-O-methyluridine
  modified_base 18: mod_base = OTHER; note = 2'-O-methyluridine
  modified_base 19: mod_base = OTHER; note = 2'-O-methylcytidine
  modified_base 20: mod_base = OTHER; note = 2'-O-methyluridine
  modified_base 21: mod_base = OTHER; note = 2'-O-methylcytidine with phosphorothioate linkage
  modified_base 22: mod_base = OTHER; note = 2'-O-methyluridine with phosphorothioate linkage
  modified_base 23: mod_base = OTHER; note = 2'-O-methylcytidine
tcacacttaggtcatcttctctc

SEQ ID NO: 1010 - RNA, 23 nt, synthetic construct
  source 1..23: mol_type = other RNA
  modified_base 1: mod_base = OTHER; note = 5'-vinyl-phosphonate-2'-O-methyluridine with phosphorothioate linkage
  modified_base 2: mod_base = OTHER; note = 2'-fluorocytidine with phosphorothioate linkage
  modified_base 3: mod_base = OTHER; note = 2'-O-methyluridine
  modified_base 4: mod_base = OTHER; note = 2'-O-methyluridine
  modified_base 5: mod_base = OTHER; note = 2'-O-methylcytidine
  modified_base 6: mod_base = OTHER; note = 2'-fluorocytidine
  modified_base 7: mod_base = OTHER; note = 2'-O-methyluridine
  modified_base 8: mod_base = OTHER; note = 2'-fluorocytidine
  modified_base 9: mod_base = OTHER; note = 2'-fluorocytidine
  modified_base 10: mod_base = OTHER; note = 2'-O-methyluridine
  modified_base 11: mod_base = OTHER; note = 2'-O-methyluridine
  modified_base 12: mod_base = OTHER; note = 2'-O-methylguanosine
  modified_base 13: mod_base = OTHER; note = 2'-O-methylguanosine
  modified_base 14: mod_base = OTHER; note = 2'-fluorouridine
  modified_base 15: mod_base = OTHER; note = 2'-O-methylcytidine
  modified_base 16: mod_base = OTHER; note = 2'-fluoroguanosine
  modified_base 17: mod_base = OTHER; note = 2'-O-methylguanosine
  modified_base 18: mod_base = OTHER; note = 2'-O-methyladenosine
  modified_base 19: mod_base = OTHER; note = 2'-O-methylguanosine
  modified_base 20: mod_base = OTHER; note = 2'-O-methylguanosine
  modified_base 21: mod_base = OTHER; note = 2'-O-methyladenosine with phosphorothioate linkage
  modified_base 22: mod_base = OTHER; note = 2'-O-methylguanosine with phosphorothioate linkage
  modified_base 23: mod_base = OTHER; note = 2'-O-methylguanosine
tcttcctccttggtcggaggagg

SEQ ID NO: 1011 - RNA, 23 nt, synthetic construct
  source 1..23: mol_type = other RNA
  modified_base 1: mod_base = OTHER; note = 5'-vinyl-phosphonate-2'-O-methyluridine with phosphorothioate linkage
  modified_base 2: mod_base = OTHER; note = 2'-fluorocytidine with phosphorothioate linkage
  modified_base 3: mod_base = OTHER; note = 2'-O-methylcytidine
  modified_base 4: mod_base = OTHER; note = 2'-O-methylguanosine
  modified_base 5: mod_base = OTHER; note = 2'-O-methylguanosine
  modified_base 6: mod_base = OTHER; note = 2'-fluoroadenosine
  modified_base 7: mod_base = OTHER; note = 2'-O-methylguanosine
  modified_base 8: mod_base = OTHER; note = 2'-fluoroadenosine
  modified_base 9: mod_base = OTHER; note = 2'-fluoroguanosine
  modified_base 10: mod_base = OTHER; note = 2'-O-methyluridine
  modified_base 11: mod_base = OTHER; note = 2'-O-methyluridine
  modified_base 12: mod_base = OTHER; note = 2'-O-methylcytidine
  modified_base 13: mod_base = OTHER; note = 2'-O-methylcytidine
  modified_base 14: mod_base = OTHER; note = 2'-fluorouridine
  modified_base 15: mod_base = OTHER; note = 2'-O-methyluridine
  modified_base 16: mod_base = OTHER; note = 2'-fluorocytidine
  modified_base 17: mod_base = OTHER; note = 2'-O-methylcytidine
  modified_base 18: mod_base = OTHER; note = 2'-O-methylcytidine
  modified_base 19: mod_base = OTHER; note = 2'-O-methyluridine
  modified_base 20: mod_base = OTHER; note = 2'-O-methylguanosine
  modified_base 21: mod_base = OTHER; note = 2'-O-methylguanosine with phosphorothioate linkage
  modified_base 22: mod_base = OTHER; note = 2'-O-methyladenosine with phosphorothioate linkage
  modified_base 23: mod_base = OTHER; note = 2'-O-methyladenosine
tccggagagttccttccctggaa

SEQ ID NO: 1012 - RNA, 23 nt, synthetic construct
  source 1..23: mol_type = other RNA
  modified_base 1: mod_base = OTHER; note = 5'-vinyl-phosphonate-2'-O-methyluridine with phosphorothioate linkage
  modified_base 2: mod_base = OTHER; note = 2'-fluoroadenosine with phosphorothioate linkage
  modified_base 3: mod_base = OTHER; note = 2'-O-methylcytidine
  modified_base 4: mod_base = OTHER; note = 2'-O-methylcytidine
  modified_base 5: mod_base = OTHER; note = 2'-O-methylguanosine
  modified_base 6: mod_base = OTHER; note = 2'-fluoroguanosine
  modified_base 7: mod_base = OTHER; note = 2'-O-methyladenosine
  modified_base 8: mod_base = OTHER; note = 2'-fluoroguanosine
  modified_base 9: mod_base = OTHER; note = 2'-fluoroadenosine
  modified_base 10: mod_base = OTHER; note = 2'-O-methylguanosine
  modified_base 11: mod_base = OTHER; note = 2'-O-methyluridine
  modified_base 12: mod_base = OTHER; note = 2'-O-methyluridine
  modified_base 13: mod_base = OTHER; note = 2'-O-methylcytidine
  modified_base 14: mod_base = OTHER; note = 2'-fluorocytidine
  modified_base 15: mod_base = OTHER; note = 2'-O-methyluridine
  modified_base 16: mod_base = OTHER; note = 2'-fluorouridine
  modified_base 17: mod_base = OTHER; note = 2'-O-methylcytidine
  modified_base 18: mod_base = OTHER; note = 2'-O-methylcytidine
  modified_base 19: mod_base = OTHER; note = 2'-O-methylcytidine
  modified_base 20: mod_base = OTHER; note = 2'-O-methyluridine
  modified_base 21: mod_base = OTHER; note = 2'-O-methylguanosine with phosphorothioate linkage
  modified_base 22: mod_base = OTHER; note = 2'-O-methylguanosine with phosphorothioate linkage
  modified_base 23: mod_base = OTHER; note = 2'-O-methyladenosine
taccggagagttccttccctgga

SEQ ID NO: 1013 - RNA, 23 nt, synthetic construct
  source 1..23: mol_type = other RNA
  modified_base 1: mod_base = OTHER; note = 5'-vinyl-phosphonate-2'-O-methyluridine with phosphorothioate linkage
  modified_base 2: mod_base = OTHER; note = 2'-fluorouridine with phosphorothioate linkage
  modified_base 3: mod_base = OTHER; note = 2'-O-methylguanosine
  modified_base 4: mod_base = OTHER; note = 2'-O-methylguanosine
  modified_base 5: mod_base = OTHER; note = 2'-O-methyluridine
  modified_base 6: mod_base = OTHER; note = 2'-fluoroguanosine
  modified_base 7: mod_base = OTHER; note = 2'-O-methylguanosine
  modified_base 8: mod_base = OTHER; note = 2'-fluoroadenosine
  modified_base 9: mod_base = OTHER; note = 2'-fluorocytidine
  modified_base 10: mod_base = OTHER; note = 2'-O-methylcytidine
  modified_base 11: mod_base = OTHER; note = 2'-O-methylguanosine
  modified_base 12: mod_base = OTHER; note = 2'-O-methylguanosine
  modified_base 13: mod_base = OTHER; note = 2'-O-methyladenosine
  modified_base 14: mod_base = OTHER; note = 2'-fluoroguanosine
  modified_base 15: mod_base = OTHER; note = 2'-O-methyladenosine
  modified_base 16: mod_base = OTHER; note = 2'-fluoroguanosine
  modified_base 17: mod_base = OTHER; note = 2'-O-methyluridine
  modified_base 18: mod_base = OTHER; note = 2'-O-methyluridine
  modified_base 19: mod_base = OTHER; note = 2'-O-methylcytidine
  modified_base 20: mod_base = OTHER; note = 2'-O-methylcytidine
  modified_base 21: mod_base = OTHER; note = 2'-O-methyluridine with phosphorothioate linkage
  modified_base 22: mod_base = OTHER; note = 2'-O-methyluridine with phosphorothioate linkage
  modified_base 23: mod_base = OTHER; note = 2'-O-methylcytidine
ttggtggaccggagagttccttc

SEQ ID NO: 1014 - RNA, 23 nt, synthetic construct
  source 1..23: mol_type = other RNA
  modified_base 1: mod_base = OTHER; note = 5'-vinyl-phosphonate-2'-O-methyluridine with phosphorothioate linkage
  modified_base 2: mod_base = OTHER; note = 2'-fluoroadenosine with phosphorothioate linkage
  modified_base 3: mod_base = OTHER; note = 2'-O-methyluridine
  modified_base 4: mod_base = OTHER; note = 2'-O-methylguanosine
  modified_base 5: mod_base = OTHER; note = 2'-O-methylguanosine
  modified_base 6: mod_base = OTHER; note = 2'-fluorouridine
  modified_base 7: mod_base = OTHER; note = 2'-O-methylguanosine
  modified_base 8: mod_base = OTHER; note = 2'-fluoroguanosine
  modified_base 9: mod_base = OTHER; note = 2'-fluoroadenosine
  modified_base 10: mod_base = OTHER; note = 2'-O-methylcytidine
  modified_base 11: mod_base = OTHER; note = 2'-O-methylcytidine
  modified_base 12: mod_base = OTHER; note = 2'-O-methylguanosine
  modified_base 13: mod_base = OTHER; note = 2'-O-methylguanosine
  modified_base 14: mod_base = OTHER; note = 2'-fluoroadenosine
  modified_base 15: mod_base = OTHER; note = 2'-O-methylguanosine
  modified_base 16: mod_base = OTHER; note = 2'-fluoroadenosine
  modified_base 17: mod_base = OTHER; note = 2'-O-methylguanosine
  modified_base 18: mod_base = OTHER; note = 2'-O-methyluridine
  modified_base 19: mod_base = OTHER; note = 2'-O-methyluridine
  modified_base 20: mod_base = OTHER; note = 2'-O-methylcytidine
  modified_base 21: mod_base = OTHER; note = 2'-O-methylcytidine with phosphorothioate linkage
  modified_base 22: mod_base = OTHER; note = 2'-O-methyluridine with phosphorothioate linkage
  modified_base 23: mod_base = OTHER; note = 2'-O-methyluridine
tatggtggaccggagagttcctt

SEQ ID NO: 1015 - RNA, 23 nt, synthetic construct
  source 1..23: mol_type = other RNA
  modified_base 1: mod_base = OTHER; note = 5'-vinyl-phosphonate-2'-O-methyluridine with phosphorothioate linkage
  modified_base 2: mod_base = OTHER; note = 2'-fluorouridine with phosphorothioate linkage
  modified_base 3: mod_base = OTHER; note = 2'-O-methylcytidine
  modified_base 4: mod_base = OTHER; note = 2'-O-methylcytidine
  modified_base 5: mod_base = OTHER; note = 2'-O-methyladenosine
  modified_base 6: mod_base = OTHER; note = 2'-fluorouridine
  modified_base 7: mod_base = OTHER; note = 2'-O-methylguanosine
  modified_base 8: mod_base = OTHER; note = 2'-fluoroguanosine
  modified_base 9: mod_base = OTHER; note = 2'-fluorouridine
  modified_base 10: mod_base = OTHER; note = 2'-O-methylguanosine
  modified_base 11: mod_base = OTHER; note = 2'-O-methylguanosine
  modified_base 12: mod_base = OTHER; note = 2'-O-methyladenosine
  modified_base 13: mod_base = OTHER; note = 2'-O-methylcytidine
  modified_base 14: mod_base = OTHER; note = 2'-fluorocytidine
  modified_base 15: mod_base = OTHER; note = 2'-O-methylguanosine
  modified_base 16: mod_base = OTHER; note = 2'-fluoroguanosine
  modified_base 17: mod_base = OTHER; note = 2'-O-methyladenosine
  modified_base 18: mod_base = OTHER; note = 2'-O-methylguanosine
  modified_base 19: mod_base = OTHER; note = 2'-O-methyladenosine
  modified_base 20: mod_base = OTHER; note = 2'-O-methylguanosine
  modified_base 21: mod_base = OTHER; note = 2'-O-methyluridine with phosphorothioate linkage
  modified_base 22: mod_base = OTHER; note = 2'-O-methyluridine with phosphorothioate linkage
  modified_base 23: mod_base = OTHER; note = 2'-O-methylcytidine
ttccatggtggaccggagagttc

SEQ ID NO: 1016 - RNA, 23 nt, synthetic construct
  source 1..23: mol_type = other RNA
  modified_base 1: mod_base = OTHER; note = 5'-vinyl-phosphonate-2'-O-methyluridine with phosphorothioate linkage
  modified_base 2: mod_base = OTHER; note = 2'-fluorouridine with phosphorothioate linkage
  modified_base 3: mod_base = OTHER; note = 2'-O-methyladenosine
  modified_base 4: mod_base = OTHER; note = 2'-O-methylcytidine
  modified_base 5: mod_base = OTHER; note = 2'-O-methyluridine
  modified_base 6: mod_base = OTHER; note = 2'-fluorocytidine
  modified_base 7: mod_base = OTHER; note = 2'-O-methylcytidine
  modified_base 8: mod_base = OTHER; note = 2'-fluoroadenosine
  modified_base 9: mod_base = OTHER; note = 2'-fluorouridine
  modified_base 10: mod_base = OTHER; note = 2'-O-methylguanosine
  modified_base 11: mod_base = OTHER; note = 2'-O-methylguanosine
  modified_base 12: mod_base = OTHER; note = 2'-O-methyluridine
  modified_base 13: mod_base = OTHER; note = 2'-O-methylguanosine
  modified_base 14: mod_base = OTHER; note = 2'-fluoroguanosine
  modified_base 15: mod_base = OTHER; note = 2'-O-methyladenosine
  modified_base 16: mod_base = OTHER; note = 2'-fluorocytidine
  modified_base 17: mod_base = OTHER; note = 2'-O-methylcytidine
  modified_base 18: mod_base = OTHER; note = 2'-O-methylguanosine
  modified_base 19: mod_base = OTHER; note = 2'-O-methylguanosine
  modified_base 20: mod_base = OTHER; note = 2'-O-methyladenosine
  modified_base 21: mod_base = OTHER; note = 2'-O-methylguanosine with phosphorothioate linkage
  modified_base 22: mod_base = OTHER; note = 2'-O-methyladenosine with phosphorothioate linkage
  modified_base 23: mod_base = OTHER; note = 2'-O-methylguanosine
ttactccatggtggaccggagag

SEQ ID NO: 1017 - RNA, 23 nt, synthetic construct
  source 1..23: mol_type = other RNA
  modified_base 1: mod_base = OTHER; note = 5'-vinyl-phosphonate-2'-O-methyluridine with phosphorothioate linkage
  modified_base 2: mod_base = OTHER; note = 2'-fluoroguanosine with phosphorothioate linkage
  modified_base 3: mod_base = OTHER; note = 2'-O-methyladenosine
  modified_base 4: mod_base = OTHER; note = 2'-O-methylguanosine
  modified_base 5: mod_base = OTHER; note = 2'-O-methyluridine
  modified_base 6: mod_base = OTHER; note = 2'-fluoroadenosine
  modified_base 7: mod_base = OTHER; note = 2'-O-methyladenosine
  modified_base 8: mod_base = OTHER; note = 2'-fluoroguanosine
  modified_base 9: mod_base = OTHER; note = 2'-fluorouridine
  modified_base 10: mod_base = OTHER; note = 2'-O-methylcytidine
  modified_base 11: mod_base = OTHER; note = 2'-O-methyladenosine
  modified_base 12: mod_base = OTHER; note = 2'-O-methylcytidine
  modified_base 13: mod_base = OTHER; note = 2'-O-methyluridine
  modified_base 14: mod_base = OTHER; note = 2'-fluoroguanosine
  modified_base 15: mod_base = OTHER; note = 2'-O-methylguanosine
  modified_base 16: mod_base = OTHER; note = 2'-fluoroguanosine
  modified_base 17: mod_base = OTHER; note = 2'-O-methylguanosine
  modified_base 18: mod_base = OTHER; note = 2'-O-methyluridine
  modified_base 19: mod_base = OTHER; note = 2'-O-methyluridine
  modified_base 20: mod_base = OTHER; note = 2'-O-methylcytidine
  modified_base 21: mod_base = OTHER; note = 2'-O-methyladenosine with phosphorothioate linkage
  modified_base 22: mod_base = OTHER; note = 2'-O-methylguanosine with phosphorothioate linkage
  modified_base 23: mod_base = OTHER; note = 2'-O-methyladenosine
tgagtaagtcactggggttcaga

SEQ ID NO: 1018 - RNA, 23 nt, synthetic construct
  source 1..23: mol_type = other RNA
  modified_base 1: mod_base = OTHER; note = 5'-vinyl-phosphonate-2'-O-methyluridine with phosphorothioate linkage
  modified_base 2: mod_base = OTHER; note = 2'-fluorouridine with phosphorothioate linkage
  modified_base 3: mod_base = OTHER; note = 2'-O-methyladenosine
  modified_base 4: mod_base = OTHER; note = 2'-O-methylcytidine
  modified_base 5: mod_base = OTHER; note = 2'-O-methyluridine
  modified_base 6: mod_base = OTHER; note = 2'-fluoroguanosine
  modified_base 7: mod_base = OTHER; note = 2'-O-methyladenosine
  modified_base 8: mod_base = OTHER; note = 2'-fluorocytidine
  modified_base 9: mod_base = OTHER; note = 2'-fluorocytidine
  modified_base 10: mod_base = OTHER; note = 2'-O-methyluridine
  modified_base 11: mod_base = OTHER; note = 2'-O-methylguanosine
  modified_base 12: mod_base = OTHER; note = 2'-O-methyladenosine
  modified_base 13: mod_base = OTHER; note = 2'-O-methylguanosine
  modified_base 14: mod_base = OTHER; note = 2'-fluorouridine
  modified_base 15: mod_base = OTHER; note = 2'-O-methyladenosine
  modified_base 16: mod_base = OTHER; note = 2'-fluoroadenosine
  modified_base 17: mod_base = OTHER; note = 2'-O-methylguanosine
  modified_base 18: mod_base = OTHER; note = 2'-O-methyluridine
  modified_base 19: mod_base = OTHER; note = 2'-O-methylcytidine
  modified_base 20: mod_base = OTHER; note = 2'-O-methyladenosine
  modified_base 21: mod_base = OTHER; note = 2'-O-methylcytidine with phosphorothioate linkage
  modified_base 22: mod_base = OTHER; note = 2'-O-methyluridine with phosphorothioate linkage
  modified_base 23: mod_base = OTHER; note = 2'-O-methylguanosine
ttactgacctgagtaagtcactg

SEQ ID NO: 1019 - RNA, 23 nt, synthetic construct
  source 1..23: mol_type = other RNA
  modified_base 1: mod_base = OTHER; note = 5'-vinyl-phosphonate-2'-O-methyluridine with phosphorothioate linkage
  modified_base 2: mod_base = OTHER; note = 2'-fluoroguanosine with phosphorothioate linkage
  modified_base 3: mod_base = OTHER; note = 2'-O-methyladenosine
  modified_base 4: mod_base = OTHER; note = 2'-O-methyluridine
  modified_base 5: mod_base = OTHER; note = 2'-O-methyladenosine
  modified_base 6: mod_base = OTHER; note = 2'-fluorocytidine
  modified_base 7: mod_base = OTHER; note = 2'-O-methyluridine
  modified_base 8: mod_base = OTHER; note = 2'-fluoroguanosine
  modified_base 9: mod_base = OTHER; note = 2'-fluoroadenosine
  modified_base 10: mod_base = OTHER; note = 2'-O-methylcytidine
  modified_base 11: mod_base = OTHER; note = 2'-O-methylcytidine
  modified_base 12: mod_base = OTHER; note = 2'-O-methyluridine
  modified_base 13: mod_base = OTHER; note = 2'-O-methylguanosine
  modified_base 14: mod_base = OTHER; note = 2'-fluoroadenosine
  modified_base 15: mod_base = OTHER; note = 2'-O-methylguanosine
  modified_base 16: mod_base = OTHER; note = 2'-fluorouridine
  modified_base 17: mod_base = OTHER; note = 2'-O-methyladenosine
  modified_base 18: mod_base = OTHER; note = 2'-O-methyladenosine
  modified_base 19: mod_base = OTHER; note = 2'-O-methylguanosine
  modified_base 20: mod_base = OTHER; note = 2'-O-methyluridine
  modified_base 21: mod_base = OTHER; note = 2'-O-methylcytidine with phosphorothioate linkage
  modified_base 22: mod_base = OTHER; note = 2'-O-methyladenosine with phosphorothioate linkage
  modified_base 23: mod_base = OTHER; note = 2'-O-methylcytidine
tgatactgacctgagtaagtcac

SEQ ID NO: 1020 - RNA, 23 nt, synthetic construct
  source 1..23: mol_type = other RNA
  modified_base 1: mod_base = OTHER; note = 5'-vinyl-phosphonate-2'-O-methyluridine with phosphorothioate linkage
  modified_base 2: mod_base = OTHER; note = 2'-fluorouridine with phosphorothioate linkage
  modified_base 3: mod_base = OTHER; note = 2'-O-methyladenosine
  modified_base 4: mod_base = OTHER; note = 2'-O-methylguanosine
  modified_base 5: mod_base = OTHER; note = 2'-O-methyladenosine
  modified_base 6: mod_base = OTHER; note = 2'-fluorouridine
  modified_base 7: mod_base = OTHER; note = 2'-O-methyladenosine
  modified_base 8: mod_base = OTHER; note = 2'-fluorocytidine
  modified_base 9: mod_base = OTHER; note = 2'-fluorouridine
  modified_base 10: mod_base = OTHER; note = 2'-O-methylguanosine
  modified_base 11: mod_base = OTHER; note = 2'-O-methyladenosine
  modified_base 12: mod_base = OTHER; note = 2'-O-methylcytidine
  modified_base 13: mod_base = OTHER; note = 2'-O-methylcytidine
  modified_base 14: mod_base = OTHER; note = 2'-fluorouridine
  modified_base 15: mod_base = OTHER; note = 2'-O-methylguanosine
  modified_base 16: mod_base = OTHER; note = 2'-fluoroadenosine
  modified_base 17: mod_base = OTHER; note = 2'-O-methylguanosine
  modified_base 18: mod_base = OTHER; note = 2'-O-methyluridine
  modified_base 19: mod_base = OTHER; note = 2'-O-methyladenosine
  modified_base 20: mod_base = OTHER; note = 2'-O-methyladenosine
  modified_base 21: mod_base = OTHER; note = 2'-O-methylguanosine with phosphorothioate linkage
  modified_base 22: mod_base = OTHER; note = 2'-O-methyluridine with phosphorothioate linkage
  modified_base 23: mod_base = OTHER; note = 2'-O-methylcytidine
ttagatactgacctgagtaagtc

SEQ ID NO: 1021 - RNA, 23 nt, synthetic construct
  source 1..23: mol_type = other RNA
  modified_base 1: mod_base = OTHER; note = 5'-vinyl-phosphonate-2'-O-methyluridine with phosphorothioate linkage
  modified_base 2: mod_base = OTHER; note = 2'-fluorocytidine with phosphorothioate linkage
  modified_base 3: mod_base = OTHER; note = 2'-O-methylguanosine
  modified_base 4: mod_base = OTHER; note = 2'-O-methyladenosine
  modified_base 5: mod_base = OTHER; note = 2'-O-methylguanosine
  modified_base 6: mod_base = OTHER; note = 2'-fluorocytidine
  modified_base 7: mod_base = OTHER; note = 2'-O-methyluridine
  modified_base 8: mod_base = OTHER; note = 2'-fluorouridine
  modified_base 9: mod_base = OTHER; note = 2'-fluoroadenosine
  modified_base 10: mod_base = OTHER; note = 2'-O-methyluridine
  modified_base 11: mod_base = OTHER; note = 2'-O-methyladenosine
  modified_base 12: mod_base = OTHER; note = 2'-O-methyluridine
  modified_base 13: mod_base = OTHER; note = 2'-O-methyluridine
  modified_base 14: mod_base = OTHER; note = 2'-fluoroadenosine
  modified_base 15: mod_base = OTHER; note = 2'-O-methylguanosine
  modified_base 16: mod_base = OTHER; note = 2'-fluoroadenosine
  modified_base 17: mod_base = OTHER; note = 2'-O-methyluridine
  modified_base 18: mod_base = OTHER; note = 2'-O-methyladenosine
  modified_base 19: mod_base = OTHER; note = 2'-O-methylcytidine
  modified_base 20: mod_base = OTHER; note = 2'-O-methyluridine
  modified_base 21: mod_base = OTHER; note = 2'-O-methylguanosine with phosphorothioate linkage
  modified_base 22: mod_base = OTHER; note = 2'-O-methyladenosine with phosphorothioate linkage
  modified_base 23: mod_base = OTHER; note = 2'-O-methylcytidine
tcgagcttatattagatactgac

SEQ ID NO: 1022 - RNA, 23 nt, synthetic construct
  source 1..23: mol_type = other RNA
  modified_base 1: mod_base = OTHER; note = 5'-vinyl-phosphonate-2'-O-methyluridine with phosphorothioate linkage
  modified_base 2: mod_base = OTHER; note = 2'-fluorouridine with phosphorothioate linkage
  modified_base 3: mod_base = OTHER; note = 2'-O-methylcytidine
  modified_base 4: mod_base = OTHER; note = 2'-O-methylcytidine
  modified_base 5: mod_base = OTHER; note = 2'-O-methylguanosine
  modified_base 6: mod_base = OTHER; note = 2'-fluoroadenosine
  modified_base 7: mod_base = OTHER; note = 2'-O-methylguanosine
  modified_base 8: mod_base = OTHER; note = 2'-fluorocytidine
  modified_base 9: mod_base = OTHER; note = 2'-fluorouridine
  modified_base 10: mod_base = OTHER; note = 2'-O-methyluridine
  modified_base 11: mod_base = OTHER; note = 2'-O-methyladenosine
  modified_base 12: mod_base = OTHER; note = 2'-O-methyluridine
  modified_base 13: mod_base = OTHER; note = 2'-O-methyladenosine
  modified_base 14: mod_base = OTHER; note = 2'-fluorouridine
  modified_base 15: mod_base = OTHER; note = 2'-O-methyluridine
  modified_base 16: mod_base = OTHER; note = 2'-fluoroadenosine
  modified_base 17: mod_base = OTHER; note = 2'-O-methylguanosine
  modified_base 18: mod_base = OTHER; note = 2'-O-methyladenosine
  modified_base 19: mod_base = OTHER; note = 2'-O-methyluridine
  modified_base 20: mod_base = OTHER; note = 2'-O-methyladenosine
  modified_base 21: mod_base = OTHER; note = 2'-O-methylcytidine with phosphorothioate linkage
  modified_base 22: mod_base = OTHER; note = 2'-O-methyluridine with phosphorothioate linkage
  modified_base 23: mod_base = OTHER; note = 2'-O-methylguanosine
ttccgagcttatattagatactg

SEQ ID NO: 1023 - RNA, 23 nt, synthetic construct
  source 1..23: mol_type = other RNA
  modified_base 1: mod_base = OTHER; note = 5'-vinyl-phosphonate-2'-O-methyluridine with phosphorothioate linkage
  modified_base 2: mod_base = OTHER; note = 2'-fluorocytidine with phosphorothioate linkage
  modified_base 3: mod_base = OTHER; note = 2'-O-methyluridine
  modified_base 4: mod_base = OTHER; note = 2'-O-methylcytidine
  modified_base 5: mod_base = OTHER; note = 2'-O-methylcytidine
  modified_base 6: mod_base = OTHER; note = 2'-fluoroguanosine
  modified_base 7: mod_base = OTHER; note = 2'-O-methyladenosine
  modified_base 8: mod_base = OTHER; note = 2'-fluoroguanosine
  modified_base 9: mod_base = OTHER; note = 2'-fluorocytidine
  modified_base 10: mod_base = OTHER; note = 2'-O-methyluridine
  modified_base 11: mod_base = OTHER; note = 2'-O-methyluridine
  modified_base 12: mod_base = OTHER; note = 2'-O-methyladenosine
  modified_base 13: mod_base = OTHER; note = 2'-O-methyluridine
  modified_base 14: mod_base = OTHER; note = 2'-fluoroadenosine
  modified_base 15: mod_base = OTHER; note = 2'-O-methyluridine
  modified_base 16: mod_base = OTHER; note = 2'-fluorouridine
  modified_base 17: mod_base = OTHER; note = 2'-O-methyladenosine
  modified_base 18: mod_base = OTHER; note = 2'-O-methylguanosine
  modified_base 19: mod_base = OTHER; note = 2'-O-methyladenosine
  modified_base 20: mod_base = OTHER; note = 2'-O-methyluridine
  modified_base 21: mod_base = OTHER; note = 2'-O-methyladenosine with phosphorothioate linkage
  modified_base 22: mod_base = OTHER; note = 2'-O-methylcytidine with phosphorothioate linkage
  modified_base 23: mod_base = OTHER; note = 2'-O-methyluridine
tctccgagcttatattagatact

SEQ ID NO: 1024 - RNA, 23 nt, synthetic construct
  source 1..23: mol_type = other RNA
  modified_base 1: mod_base = OTHER; note = 5'-vinyl-phosphonate-2'-O-methyluridine with phosphorothioate linkage
  modified_base 2: mod_base = OTHER; note = 2'-fluoroadenosine with phosphorothioate linkage
  modified_base 3: mod_base = OTHER; note = 2'-O-methylcytidine
  modified_base 4: mod_base = OTHER; note = 2'-O-methyluridine
  modified_base 5: mod_base = OTHER; note = 2'-O-methylcytidine
  modified_base 6: mod_base = OTHER; note = 2'-fluorocytidine
  modified_base 7: mod_base = OTHER; note = 2'-O-methylguanosine
  modified_base 8: mod_base = OTHER; note = 2'-fluoroadenosine
  modified_base 9: mod_base = OTHER; note = 2'-fluoroguanosine
  modified_base 10: mod_base = OTHER; note = 2'-O-methylcytidine
  modified_base 11: mod_base = OTHER; note = 2'-O-methyluridine
  modified_base 12: mod_base = OTHER; note = 2'-O-methyluridine
  modified_base 13: mod_base = OTHER; note = 2'-O-methyladenosine
  modified_base 14: mod_base = OTHER; note = 2'-fluorouridine
  modified_base 15: mod_base = OTHER; note = 2'-O-methyladenosine
  modified_base 16: mod_base = OTHER; note = 2'-fluorouridine
  modified_base 17: mod_base = OTHER; note = 2'-O-methyluridine
  modified_base 18: mod_base = OTHER; note = 2'-O-methyladenosine
  modified_base 19: mod_base = OTHER; note = 2'-O-methylguanosine
  modified_base 20: mod_base = OTHER; note = 2'-O-methyladenosine
  modified_base 21: mod_base = OTHER; note = 2'-O-methyluridine with phosphorothioate linkage
  modified_base 22: mod_base = OTHER; note = 2'-O-methyladenosine with phosphorothioate linkage
  modified_base 23: mod_base = OTHER; note = 2'-O-methylcytidine
tactccgagcttatattagatac

SEQ ID NO: 1025 - RNA, 23 nt, synthetic construct
  source 1..23: mol_type = other RNA
  modified_base 1: mod_base = OTHER; note = 5'-vinyl-phosphonate-2'-O-methyluridine with phosphorothioate linkage
  modified_base 2: mod_base = OTHER; note = 2'-fluoroadenosine with phosphorothioate linkage
  modified_base 3: mod_base = OTHER; note = 2'-O-methyladenosine
  modified_base 4: mod_base = OTHER; note = 2'-O-methylcytidine
  modified_base 5: mod_base = OTHER; note = 2'-O-methyluridine
  modified_base 6: mod_base = OTHER; note = 2'-fluorocytidine
  modified_base 7: mod_base = OTHER; note = 2'-O-methylcytidine
  modified_base 8: mod_base = OTHER; note = 2'-fluoroguanosine
  modified_base 9: mod_base = OTHER; note = 2'-fluoroadenosine
  modified_base 10: mod_base = OTHER; note = 2'-O-methylguanosine
  modified_base 11: mod_base = OTHER; note = 2'-O-methylcytidine
  modified_base 12: mod_base = OTHER; note = 2'-O-methyluridine
  modified_base 13: mod_base = OTHER; note = 2'-O-methyluridine
  modified_base 14: mod_base = OTHER; note = 2'-fluoroadenosine
  modified_base 15: mod_base = OTHER; note = 2'-O-methyluridine
  modified_base 16: mod_base = OTHER; note = 2'-fluoroadenosine
  modified_base 17: mod_base = OTHER; note = 2'-O-methyluridine
  modified_base 18: mod_base = OTHER; note = 2'-O-methyluridine
  modified_base 19: mod_base = OTHER; note = 2'-O-methyladenosine
  modified_base 20: mod_base = OTHER; note = 2'-O-methylguanosine
  modified_base 21: mod_base = OTHER; note = 2'-O-methyladenosine with phosphorothioate linkage
  modified_base 22: mod_base = OTHER; note = 2'-O-methyluridine with phosphorothioate linkage
  modified_base 23: mod_base = OTHER; note = 2'-O-methyladenosine
taactccgagcttatattagata

SEQ ID NO: 1026 - RNA, 23 nt, synthetic construct
  source 1..23: mol_type = other RNA
  modified_base 1: mod_base = OTHER; note = 5'-vinyl-phosphonate-2'-O-methyluridine with phosphorothioate linkage
  modified_base 2: mod_base = OTHER; note = 2'-fluoroadenosine with phosphorothioate linkage
  modified_base 3: mod_base = OTHER; note = 2'-O-methyladenosine
  modified_base 4: mod_base = OTHER; note = 2'-O-methyladenosine
  modified_base 5: mod_base = OTHER; note = 2'-O-methylcytidine
  modified_base 6: mod_base = OTHER; note = 2'-fluorouridine
  modified_base 7: mod_base = OTHER; note = 2'-O-methylcytidine
  modified_base 8: mod_base = OTHER; note = 2'-fluorocytidine
  modified_base 9: mod_base = OTHER; note = 2'-fluoroguanosine
  modified_base 10: mod_base = OTHER; note = 2'-O-methyladenosine
  modified_base 11: mod_base = OTHER; note = 2'-O-methylguanosine
  modified_base 12: mod_base = OTHER; note = 2'-O-methylcytidine
  modified_base 13: mod_base = OTHER; note = 2'-O-methyluridine
  modified_base 14: mod_base = OTHER; note = 2'-fluorouridine
  modified_base 15: mod_base = OTHER; note = 2'-O-methyladenosine
  modified_base 16: mod_base = OTHER; note = 2'-fluorouridine
  modified_base 17: mod_base = OTHER; note = 2'-O-methyladenosine
  modified_base 18: mod_base = OTHER; note = 2'-O-methyluridine
  modified_base 19: mod_base = OTHER; note = 2'-O-methyluridine
  modified_base 20: mod_base = OTHER; note = 2'-O-methyladenosine
  modified_base 21: mod_base = OTHER; note = 2'-O-methylguanosine with phosphorothioate linkage
  modified_base 22: mod_base = OTHER; note = 2'-O-methyladenosine with phosphorothioate linkage
  modified_base 23: mod_base = OTHER; note = 2'-O-methyluridine
taaactccgagcttatattagat

SEQ ID NO: 1027 - RNA, 23 nt, synthetic construct
  source 1..23: mol_type = other RNA
  modified_base 1: mod_base = OTHER; note = 5'-vinyl-phosphonate-2'-O-methyluridine with phosphorothioate linkage
  modified_base 2: mod_base = OTHER; note = 2'-fluorocytidine with phosphorothioate linkage
  modified_base 3: mod_base = OTHER; note = 2'-O-methyladenosine
  modified_base 4: mod_base = OTHER; note = 2'-O-methyladenosine
  modified_base 5: mod_base = OTHER; note = 2'-O-methyladenosine
  modified_base 6: mod_base = OTHER; note = 2'-fluorocytidine
  modified_base 7: mod_base = OTHER; note = 2'-O-methyluridine
  modified_base 8: mod_base = OTHER; note = 2'-fluorocytidine
  modified_base 9: mod_base = OTHER; note = 2'-fluorocytidine
  modified_base 10: mod_base = OTHER; note = 2'-O-methylguanosine
  modified_base 11: mod_base = OTHER; note = 2'-O-methyladenosine
  modified_base 12: mod_base = OTHER; note = 2'-O-methylguanosine
  modified_base 13: mod_base = OTHER; note = 2'-O-methylcytidine
  modified_base 14: mod_base = OTHER; note = 2'-fluorouridine
  modified_base 15: mod_base = OTHER; note = 2'-O-methyluridine
  modified_base 16: mod_base = OTHER; note = 2'-fluoroadenosine
  modified_base 17: mod_base = OTHER; note = 2'-O-methyluridine
  modified_base 18: mod_base = OTHER; note = 2'-O-methyladenosine
  modified_base 19: mod_base = OTHER; note = 2'-O-methyluridine
  modified_base 20: mod_base = OTHER; note = 2'-O-methyluridine
  modified_base 21: mod_base = OTHER; note = 2'-O-methyladenosine with phosphorothioate linkage
  modified_base 22: mod_base = OTHER; note = 2'-O-methylguanosine with phosphorothioate linkage
  modified_base 23: mod_base = OTHER; note = 2'-O-methyladenosine
tcaaactccgagcttatattaga

SEQ ID NO: 1028 - RNA, 23 nt, synthetic construct
  source 1..23: mol_type = other RNA
  modified_base 1: mod_base = OTHER; note = 5'-vinyl-phosphonate-2'-O-methyluridine with phosphorothioate linkage
  modified_base 2: mod_base = OTHER; note = 2'-fluorouridine with phosphorothioate linkage
  modified_base 3: mod_base = OTHER; note = 2'-O-methylcytidine
  modified_base 4: mod_base = OTHER; note = 2'-O-methylcytidine
  modified_base 5: mod_base = OTHER; note = 2'-O-methyladenosine
  modified_base 6: mod_base = OTHER; note = 2'-fluoroadenosine
  modified_base 7: mod_base = OTHER; note = 2'-O-methyladenosine
  modified_base 8: mod_base = OTHER; note = 2'-fluorocytidine
  modified_base 9: mod_base = OTHER; note = 2'-fluorouridine
  modified_base 10: mod_base = OTHER; note = 2'-O-methylcytidine
  modified_base 11: mod_base = OTHER; note = 2'-O-methylcytidine
  modified_base 12: mod_base = OTHER; note = 2'-O-methylguanosine
  modified_base 13: mod_base = OTHER; note = 2'-O-methyladenosine
  modified_base 14: mod_base = OTHER; note = 2'-fluoroguanosine
  modified_base 15: mod_base = OTHER; note = 2'-O-methylcytidine
  modified_base 16: mod_base = OTHER; note = 2'-fluorouridine
  modified_base 17: mod_base = OTHER; note = 2'-O-methyluridine
  modified_base 18: mod_base = OTHER; note = 2'-O-methyladenosine
  modified_base 19: mod_base = OTHER; note = 2'-O-methyluridine
  modified_base 20: mod_base = OTHER; note = 2'-O-methyladenosine
  modified_base 21: mod_base = OTHER; note = 2'-O-methyluridine with phosphorothioate linkage
  modified_base 22: mod_base = OTHER; note = 2'-O-methyluridine with phosphorothioate linkage
  modified_base 23: mod_base = OTHER; note = 2'-O-methyladenosine
ttccaaactccgagcttatatta

SEQ ID NO: 1029 - RNA, 23 nt, synthetic construct
  source 1..23: mol_type = other RNA
  modified_base 1: mod_base = OTHER; note = 5'-vinyl-phosphonate-2'-O-methyluridine with phosphorothioate linkage
  modified_base 2: mod_base = OTHER; note = 2'-fluoroguanosine with phosphorothioate linkage
  modified_base 3: mod_base = OTHER; note = 2'-O-methyluridine
  modified_base 4: mod_base = OTHER; note = 2'-O-methylcytidine
  modified_base 5: mod_base = OTHER; note = 2'-O-methylcytidine
  modified_base 6: mod_base = OTHER; note = 2'-fluoroadenosine
  modified_base 7: mod_base = OTHER; note = 2'-O-methyladenosine
  modified_base 8: mod_base = OTHER; note = 2'-fluoroadenosine
  modified_base 9: mod_base = OTHER; note = 2'-fluorocytidine
  modified_base 10: mod_base = OTHER; note = 2'-O-methyluridine
  modified_base 11: mod_base = OTHER; note = 2'-O-methylcytidine
  modified_base 12: mod_base = OTHER; note = 2'-O-methylcytidine
  modified_base 13: mod_base = OTHER; note = 2'-O-methylguanosine
  modified_base 14: mod_base = OTHER; note = 2'-fluoroadenosine
  modified_base 15: mod_base = OTHER; note = 2'-O-methylguanosine
  modified_base 16: mod_base = OTHER; note = 2'-fluorocytidine
  modified_base 17: mod_base = OTHER; note = 2'-O-methyluridine
  modified_base 18: mod_base = OTHER; note = 2'-O-methyluridine
  modified_base 19: mod_base = OTHER; note = 2'-O-methyladenosine
  modified_base 20: mod_base = OTHER; note = 2'-O-methyluridine
  modified_base 21: mod_base = OTHER; note = 2'-O-methyladenosine with phosphorothioate linkage
  modified_base 22: mod_base = OTHER; note = 2'-O-methyluridine with phosphorothioate linkage
  modified_base 23: mod_base = OTHER; note = 2'-O-methyluridine
tgtccaaactccgagcttatatt

SEQ ID NO: 1030 - RNA, 23 nt, synthetic construct
  source 1..23: mol_type = other RNA
  modified_base 1: mod_base = OTHER; note = 5'-vinyl-phosphonate-2'-O-methyluridine with phosphorothioate linkage
  modified_base 2: mod_base = OTHER; note = 2'-fluorocytidine with phosphorothioate linkage
  modified_base 3: mod_base = OTHER; note = 2'-O-methylguanosine
  modified_base 4: mod_base = OTHER; note = 2'-O-methyluridine
  modified_base 5: mod_base = OTHER; note = 2'-O-methylcytidine
  modified_base 6: mod_base = OTHER; note = 2'-fluorocytidine
  modified_base 7: mod_base = OTHER; note = 2'-O-methyladenosine
  modified_base 8: mod_base = OTHER; note = 2'-fluoroadenosine
  modified_base 9: mod_base = OTHER; note = 2'-fluoroadenosine
  modified_base 10: mod_base = OTHER; note = 2'-O-methylcytidine
  modified_base 11: mod_base = OTHER; note = 2'-O-methyluridine
  modified_base 12: mod_base = OTHER; note = 2'-O-methylcytidine
  modified_base 13: mod_base = OTHER; note = 2'-O-methylcytidine
  modified_base 14: mod_base = OTHER; note = 2'-fluoroguanosine
  modified_base 15: mod_base = OTHER; note = 2'-O-methyladenosine
  modified_base 16: mod_base = OTHER; note = 2'-fluoroguanosine
  modified_base 17: mod_base = OTHER; note = 2'-O-methylcytidine
  modified_base 18: mod_base = OTHER; note = 2'-O-methyluridine
  modified_base 19: mod_base = OTHER; note = 2'-O-methyluridine
  modified_base 20: mod_base = OTHER; note = 2'-O-methyladenosine
  modified_base 21: mod_base = OTHER; note = 2'-O-methyluridine with phosphorothioate linkage
  modified_base 22: mod_base = OTHER; note = 2'-O-methyladenosine with phosphorothioate linkage
  modified_base 23: mod_base = OTHER; note = 2'-O-methyluridine
tcgtccaaactccgagcttatat

SEQ ID NO: 1031 - RNA, 23 nt, synthetic construct
  source 1..23: mol_type = other RNA
  modified_base 1: mod_base = OTHER; note = 5'-vinyl-phosphonate-2'-O-methyluridine with phosphorothioate linkage
  modified_base 2: mod_base = OTHER; note = 2'-fluorocytidine with phosphorothioate linkage
  modified_base 3: mod_base = OTHER; note = 2'-O-methylcytidine
  modified_base 4: mod_base = OTHER; note = 2'-O-methyluridine
  modified_base 5: mod_base = OTHER; note = 2'-O-methylcytidine
  modified_base 6: mod_base = OTHER; note = 2'-fluorocytidine
  modified_base 7: mod_base = OTHER; note = 2'-O-methylguanosine
  modified_base 8: mod_base = OTHER; note = 2'-fluorouridine
  modified_base 9: mod_base = OTHER; note = 2'-fluorocytidine
  modified_base 10: mod_base = OTHER; note = 2'-O-methylcytidine
  modified_base 11: mod_base = OTHER; note = 2'-O-methyladenosine
  modified_base 12: mod_base = OTHER; note = 2'-O-methyladenosine
  modified_base 13: mod_base = OTHER; note = 2'-O-methyladenosine
  modified_base 14: mod_base = OTHER; note = 2'-fluorocytidine
  modified_base 15: mod_base = OTHER; note = 2'-O-methyluridine
  modified_base 16: mod_base = OTHER; note = 2'-fluorocytidine
  modified_base 17: mod_base = OTHER; note = 2'-O-methylcytidine
  modified_base 18: mod_base = OTHER; note = 2'-O-methylguanosine
  modified_base 19: mod_base = OTHER; note = 2'-O-methyladenosine
  modified_base 20: mod_base = OTHER; note = 2'-O-methylguanosine
  modified_base 21: mod_base = OTHER; note = 2'-O-methylcytidine with phosphorothioate linkage
  modified_base 22: mod_base = OTHER; note = 2'-O-methyluridine with phosphorothioate linkage
  modified_base 23: mod_base = OTHER; note = 2'-O-methyluridine
tcctccgtccaaactccgagctt

SEQ ID NO: 1032 - RNA, 23 nt, synthetic construct
  source 1..23: mol_type = other RNA
  modified_base 1: mod_base = OTHER; note = 5'-vinyl-phosphonate-2'-O-methyluridine with phosphorothioate linkage
  modified_base 2: mod_base = OTHER; note = 2'-fluoroadenosine with phosphorothioate linkage
  modified_base 3: mod_base = OTHER; note = 2'-O-methylguanosine
  modified_base 4: mod_base = OTHER; note = 2'-O-methyladenosine
  modified_base 5: mod_base = OTHER; note = 2'-O-methylcytidine
  modified_base 6: mod_base = OTHER; note = 2'-fluorocytidine
  modified_base 7: mod_base = OTHER; note = 2'-O-methylcytidine
  modified_base 8: mod_base = OTHER; note = 2'-fluorouridine
  modified_base 9: mod_base = OTHER; note = 2'-fluorocytidine
  modified_base 10: mod_base = OTHER; note = 2'-O-methylcytidine
  modified_base 11: mod_base = OTHER; note = 2'-O-methylguanosine
  modified_base 12: mod_base = OTHER; note = 2'-O-methyluridine
  modified_base 13: mod_base = OTHER; note = 2'-O-methylcytidine
  modified_base 14: mod_base = OTHER; note = 2'-fluorocytidine
  modified_base 15: mod_base = OTHER; note = 2'-O-methyladenosine
  modified_base 16: mod_base = OTHER; note = 2'-fluoroadenosine
  modified_base 17: mod_base = OTHER; note = 2'-O-methyladenosine
  modified_base 18: mod_base = OTHER; note = 2'-O-methylcytidine
  modified_base 19: mod_base = OTHER; note = 2'-O-methyluridine
  modified_base 20: mod_base = OTHER; note = 2'-O-methylcytidine
  modified_base 21: mod_base = OTHER; note = 2'-O-methylcytidine with phosphorothioate linkage
  modified_base 22: mod_base = OTHER; note = 2'-O-methylguanosine with phosphorothioate linkage
  modified_base 23: mod_base = OTHER; note = 2'-O-methyladenosine
tagaccctccgtccaaactccga

SEQ ID NO: 1033 - RNA, 23 nt, synthetic construct
  source 1..23: mol_type = other RNA
  modified_base 1: mod_base = OTHER; note = 5'-vinyl-phosphonate-2'-O-methyluridine with phosphorothioate linkage
  modified_base 2: mod_base = OTHER; note = 2'-fluoroadenosine with phosphorothioate linkage
  modified_base 3: mod_base = OTHER; note = 2'-O-methylcytidine
  modified_base 4: mod_base = OTHER; note = 2'-O-methylguanosine
  modified_base 5: mod_base = OTHER; note = 2'-O-methylguanosine
  modified_base 6: mod_base = OTHER; note = 2'-fluoroadenosine
  modified_base 7: mod_base = OTHER; note = 2'-O-methyladenosine
  modified_base 8: mod_base = OTHER; note = 2'-fluoroadenosine
  modified_base 9: mod_base = OTHER; note = 2'-fluoroguanosine
  modified_base 10: mod_base = OTHER; note = 2'-O-methylguanosine
  modified_base 11: mod_base = OTHER; note = 2'-O-methyluridine
  modified_base 12: mod_base = OTHER; note = 2'-O-methylcytidine
  modified_base 13: mod_base = OTHER; note = 2'-O-methylguanosine
  modified_base 14: mod_base = OTHER; note = 2'-fluorocytidine
  modified_base 15: mod_base = OTHER; note = 2'-O-methyluridine
  modified_base 16: mod_base = OTHER; note = 2'-fluoroguanosine
  modified_base 17: mod_base = OTHER; note = 2'-O-methylguanosine
  modified_base 18: mod_base = OTHER; note = 2'-O-methylguanosine
  modified_base 19: mod_base = OTHER; note = 2'-O-methylguanosine
  modified_base 20: mod_base = OTHER; note = 2'-O-methyluridine
  modified_base 21: mod_base = OTHER; note = 2'-O-methylguanosine with phosphorothioate linkage
  modified_base 22: mod_base = OTHER; note = 2'-O-methylguanosine with phosphorothioate linkage
  modified_base 23: mod_base = OTHER; note = 2'-O-methyluridine
tacggaaaggtcgctggggtggt

SEQ ID NO: 1034 - RNA, 23 nt, synthetic construct
  source 1..23: mol_type = other RNA
  modified_base 1: mod_base = OTHER; note = 5'-vinyl-phosphonate-2'-O-methyluridine with phosphorothioate linkage
  modified_base 2: mod_base = OTHER; note = 2'-fluoroguanosine with phosphorothioate linkage
  modified_base 3: mod_base = OTHER; note = 2'-O-methyluridine
  modified_base 4: mod_base = OTHER; note = 2'-O-methylcytidine
  modified_base 5: mod_base = OTHER; note = 2'-O-methylcytidine
  modified_base 6: mod_base = OTHER; note = 2'-fluoroguanosine
  modified_base 7: mod_base = OTHER; note = 2'-O-methylcytidine
  modified_base 8: mod_base = OTHER; note = 2'-fluorouridine
  modified_base 9: mod_base = OTHER; note = 2'-fluorouridine
  modified_base 10: mod_base = OTHER; note = 2'-O-methylguanosine
  modified_base 11: mod_base = OTHER; note = 2'-O-methyluridine
  modified_base 12: mod_base = OTHER; note = 2'-O-methylguanosine
  modified_base 13: mod_base = OTHER; note = 2'-O-methyladenosine
  modified_base 14: mod_base = OTHER; note = 2'-fluorouridine
  modified_base 15: mod_base = OTHER; note = 2'-O-methylcytidine
  modified_base 16: mod_base = OTHER; note = 2'-fluoroadenosine
  modified_base 17: mod_base = OTHER; note = 2'-O-methylcytidine
  modified_base 18: mod_base = OTHER; note = 2'-O-methyladenosine
  modified_base 19: mod_base = OTHER; note = 2'-O-methylguanosine
  modified_base 20: mod_base = OTHER; note = 2'-O-methyladenosine
  modified_base 21: mod_base = OTHER; note = 2'-O-methylcytidine with phosphorothioate linkage
  modified_base 22: mod_base = OTHER; note = 2'-O-methyladenosine with phosphorothioate linkage
  modified_base 23: mod_base = OTHER; note = 2'-O-methylcytidine
tgtccgcttgtgatcacagacac

SEQ ID NO: 1035 - RNA, 23 nt, synthetic construct
  source 1..23: mol_type = other RNA
  modified_base 1: mod_base = OTHER; note = 5'-vinyl-phosphonate-2'-O-methyluridine with phosphorothioate linkage
  modified_base 2: mod_base = OTHER; note = 2'-fluoroguanosine with phosphorothioate linkage
  modified_base 3: mod_base = OTHER; note = 2'-O-methylguanosine
  modified_base 4: mod_base = OTHER; note = 2'-O-methyluridine
  modified_base 5: mod_base = OTHER; note = 2'-O-methylcytidine
  modified_base 6: mod_base = OTHER; note = 2'-fluorocytidine
  modified_base 7: mod_base = OTHER; note = 2'-O-methylguanosine
  modified_base 8: mod_base = OTHER; note = 2'-fluorocytidine
  modified_base 9: mod_base = OTHER; note = 2'-fluorouridine
  modified_base 10: mod_base = OTHER; note = 2'-O-methyluridine
  modified_base 11: mod_base = OTHER; note = 2'-O-methylguanosine
  modified_base 12: mod_base = OTHER; note = 2'-O-methyluridine
  modified_base 13: mod_base = OTHER; note = 2'-O-methylguanosine
  modified_base 14: mod_base = OTHER; note = 2'-fluoroadenosine
  modified_base 15: mod_base = OTHER; note = 2'-O-methyluridine
  modified_base 16: mod_base = OTHER; note = 2'-fluorocytidine
  modified_base 17: mod_base = OTHER; note = 2'-O-methyladenosine
  modified_base 18: mod_base = OTHER; note = 2'-O-methylcytidine
  modified_base 19: mod_base = OTHER; note = 2'-O-methyladenosine
  modified_base 20: mod_base = OTHER; note = 2'-O-methylguanosine
  modified_base 21: mod_base = OTHER; note = 2'-O-methyladenosine with phosphorothioate linkage
  modified_base 22: mod_base = OTHER; note = 2'-O-methylcytidine with phosphorothioate linkage
  modified_base 23: mod_base = OTHER; note = 2'-O-methyladenosine
tggtccgcttgtgatcacagaca

SEQ ID NO: 1036 - RNA, 23 nt, synthetic construct
  source 1..23: mol_type = other RNA
  modified_base 1: mod_base = OTHER; note = 5'-vinyl-phosphonate-2'-O-methyluridine with phosphorothioate linkage
  modified_base 2: mod_base = OTHER; note = 2'-fluorouridine with phosphorothioate linkage
  modified_base 3: mod_base = OTHER; note = 2'-O-methylguanosine
  modified_base 4: mod_base = OTHER; note = 2'-O-methylguanosine
  modified_base 5: mod_base = OTHER; note = 2'-O-methyluridine
  modified_base 6: mod_base = OTHER; note = 2'-fluorocytidine
  modified_base 7: mod_base = OTHER; note = 2'-O-methylcytidine
  modified_base 8: mod_base = OTHER; note = 2'-fluoroguanosine
  modified_base 9: mod_base = OTHER; note = 2'-fluorocytidine
  modified_base 10: mod_base = OTHER; note = 2'-O-methyluridine
  modified_base 11: mod_base = OTHER; note = 2'-O-methyluridine
  modified_base 12: mod_base = OTHER; note = 2'-O-methylguanosine
  modified_base 13: mod_base = OTHER; note = 2'-O-methyluridine
  modified_base 14: mod_base = OTHER; note = 2'-fluoroguanosine
  modified_base 15: mod_base = OTHER; note = 2'-O-methyladenosine
  modified_base 16: mod_base = OTHER; note = 2'-fluorouridine
  modified_base 17: mod_base = OTHER; note = 2'-O-methylcytidine
  modified_base 18: mod_base = OTHER; note = 2'-O-methyladenosine
  modified_base 19: mod_base = OTHER; note = 2'-O-methylcytidine
  modified_base 20: mod_base = OTHER; note = 2'-O-methyladenosine
  modified_base 21: mod_base = OTHER; note = 2'-O-methylguanosine with phosphorothioate linkage
  modified_base 22: mod_base = OTHER; note = 2'-O-methyladenosine with phosphorothioate linkage
  modified_base 23: mod_base = OTHER; note = 2'-O-methylcytidine
ttggtccgcttgtgatcacagac

SEQ ID NO: 1037 - RNA, 23 nt, synthetic construct
  source 1..23: mol_type = other RNA
  modified_base 1: mod_base = OTHER; note = 5'-vinyl-phosphonate-2'-O-methyluridine with phosphorothioate linkage
  modified_base 2: mod_base = OTHER; note = 2'-fluoroadenosine with phosphorothioate linkage
  modified_base 3: mod_base = OTHER; note = 2'-O-methyluridine
  modified_base 4: mod_base = OTHER; note = 2'-O-methylguanosine
  modified_base 5: mod_base = OTHER; note = 2'-O-methylguanosine
  modified_base 6: mod_base = OTHER; note = 2'-fluorouridine
  modified_base 7: mod_base = OTHER; note = 2'-O-methylcytidine
  modified_base 8: mod_base = OTHER; note = 2'-fluorocytidine
  modified_base 9: mod_base = OTHER; note = 2'-fluoroguanosine
  modified_base 10: mod_base = OTHER; note = 2'-O-methylcytidine
  modified_base 11: mod_base = OTHER; note = 2'-O-methyluridine
  modified_base 12: mod_base = OTHER; note = 2'-O-methyluridine
  modified_base 13: mod_base = OTHER; note = 2'-O-methylguanosine
  modified_base 14: mod_base = OTHER; note = 2'-fluorouridine
  modified_base 15: mod_base = OTHER; note = 2'-O-methylguanosine
  modified_base 16: mod_base = OTHER; note = 2'-fluoroadenosine
  modified_base 17: mod_base = OTHER; note = 2'-O-methyluridine
  modified_base 18: mod_base = OTHER; note = 2'-O-methylcytidine
  modified_base 19: mod_base = OTHER; note = 2'-O-methyladenosine
  modified_base 20: mod_base = OTHER; note = 2'-O-methylcytidine
  modified_base 21: mod_base = OTHER; note = 2'-O-methyladenosine with phosphorothioate linkage
  modified_base 22: mod_base = OTHER; note = 2'-O-methylguanosine with phosphorothioate linkage
  modified_base 23: mod_base = OTHER; note = 2'-O-methyladenosine
tatggtccgcttgtgatcacaga

SEQ ID NO: 1038 - RNA, 23 nt, synthetic construct
  source 1..23: mol_type = other RNA
  modified_base 1: mod_base = OTHER; note = 5'-vinyl-phosphonate-2'-O-methyluridine with phosphorothioate linkage
  modified_base 2: mod_base = OTHER; note = 2'-fluoroguanosine with phosphorothioate linkage
  modified_base 3: mod_base = OTHER; note = 2'-O-methyladenosine
  modified_base 4: mod_base = OTHER; note = 2'-O-methyluridine
  modified_base 5: mod_base = OTHER; note = 2'-O-methylguanosine
  modified_base 6: mod_base = OTHER; note = 2'-fluoroguanosine
  modified_base 7: mod_base = OTHER; note = 2'-O-methyluridine
  modified_base 8: mod_base = OTHER; note = 2'-fluorocytidine
  modified_base 9: mod_base = OTHER; note = 2'-fluorocytidine
  modified_base 10: mod_base = OTHER; note = 2'-O-methylguanosine
  modified_base 11: mod_base = OTHER; note = 2'-O-methylcytidine
  modified_base 12: mod_base = OTHER; note = 2'-O-methyluridine
  modified_base 13: mod_base = OTHER; note = 2'-O-methyluridine
  modified_base 14: mod_base = OTHER; note = 2'-fluoroguanosine
  modified_base 15: mod_base = OTHER; note = 2'-O-methyluridine
  modified_base 16: mod_base = OTHER; note = 2'-fluoroguanosine
  modified_base 17: mod_base = OTHER; note = 2'-O-methyladenosine
  modified_base 18: mod_base = OTHER; note = 2'-O-methyluridine
  modified_base 19: mod_base = OTHER; note = 2'-O-methylcytidine
  modified_base 20: mod_base = OTHER; note = 2'-O-methyladenosine
  modified_base 21: mod_base = OTHER; note = 2'-O-methylcytidine with phosphorothioate linkage
  modified_base 22: mod_base = OTHER; note = 2'-O-methyladenosine with phosphorothioate linkage
  modified_base 23: mod_base = OTHER; note = 2'-O-methylguanosine
tgatggtccgcttgtgatcacag

SEQ ID NO: 1039 - RNA, 23 nt, synthetic construct
  source 1..23: mol_type = other RNA
  modified_base 1: mod_base = OTHER; note = 5'-vinyl-phosphonate-2'-O-methyluridine with phosphorothioate linkage
  modified_base 2: mod_base = OTHER; note = 2'-fluorouridine with phosphorothioate linkage
  modified_base 3: mod_base = OTHER; note = 2'-O-methylguanosine
  modified_base 4: mod_base = OTHER; note = 2'-O-methylcytidine
  modified_base 5: mod_base = OTHER; note = 2'-O-methyluridine
  modified_base 6: mod_base = OTHER; note = 2'-fluorouridine
  modified_base 7: mod_base = OTHER; note = 2'-O-methyluridine
  modified_base 8: mod_base = OTHER; note = 2'-fluoroguanosine
  modified_base 9: mod_base = OTHER; note = 2'-fluoroguanosine
  modified_base 10: mod_base = OTHER; note = 2'-O-methylcytidine
  modified_base 11: mod_base = OTHER; note = 2'-O-methyluridine
  modified_base 12: mod_base = OTHER; note = 2'-O-methyladenosine
  modified_base 13: mod_base = OTHER; note = 2'-O-methylguanosine
  modified_base 14: mod_base = OTHER; note = 2'-fluorocytidine
  modified_base 15: mod_base = OTHER; note = 2'-O-methyladenosine
  modified_base 16: mod_base = OTHER; note = 2'-fluoroguanosine
  modified_base 17: mod_base = OTHER; note = 2'-O-methylcytidine
  modified_base 18: mod_base = OTHER; note = 2'-O-methyluridine
  modified_base 19: mod_base = OTHER; note = 2'-O-methylcytidine
  modified_base 20: mod_base = OTHER; note = 2'-O-methylcytidine
  modified_base 21: mod_base = OTHER; note = 2'-O-methyluridine with phosphorothioate linkage
  modified_base 22: mod_base = OTHER; note = 2'-O-methylguanosine with phosphorothioate linkage
  modified_base 23: mod_base = OTHER; note = 2'-O-methylguanosine
ttgctttggctagcagctcctgg

SEQ ID NO: 1040 - RNA, 23 nt, synthetic construct
  source 1..23: mol_type = other RNA
  modified_base 1: mod_base = OTHER; note = 5'-vinyl-phosphonate-2'-O-methyluridine with phosphorothioate linkage
  modified_base 2: mod_base = OTHER; note = 2'-fluorocytidine with phosphorothioate linkage
  modified_base 3: mod_base = OTHER; note = 2'-O-methyladenosine
  modified_base 4: mod_base = OTHER; note = 2'-O-methyladenosine
  modified_base 5: mod_base = OTHER; note = 2'-O-methyluridine
  modified_base 6: mod_base = OTHER; note = 2'-fluoroguanosine
  modified_base 7: mod_base = OTHER; note = 2'-O-methylcytidine
  modified_base 8: mod_base = OTHER; note = 2'-fluorouridine
  modified_base 9: mod_base = OTHER; note = 2'-fluorouridine
  modified_base 10: mod_base = OTHER; note = 2'-O-methyluridine
  modified_base 11: mod_base = OTHER; note = 2'-O-methylguanosine
  modified_base 12: mod_base = OTHER; note = 2'-O-methylguanosine
  modified_base 13: mod_base = OTHER; note = 2'-O-methylcytidine
  modified_base 14: mod_base = OTHER; note = 2'-fluorouridine
  modified_base 15: mod_base = OTHER; note = 2'-O-methyladenosine
  modified_base 16: mod_base = OTHER; note = 2'-fluoroguanosine
  modified_base 17: mod_base = OTHER; note = 2'-O-methylcytidine
  modified_base 18: mod_base = OTHER; note = 2'-O-methyladenosine
  modified_base 19: mod_base = OTHER; note = 2'-O-methylguanosine
  modified_base 20: mod_base = OTHER; note = 2'-O-methylcytidine
  modified_base 21: mod_base = OTHER; note = 2'-O-methyluridine with phosphorothioate linkage
  modified_base 22: mod_base = OTHER; note = 2'-O-methylcytidine with phosphorothioate linkage
  modified_base 23: mod_base = OTHER; note = 2'-O-methylcytidine
tcaatgctttggctagcagctcc

SEQ ID NO: 1041 - RNA, 23 nt, synthetic construct
  source 1..23: mol_type = other RNA
  modified_base 1: mod_base = OTHER; note = 5'-vinyl-phosphonate-2'-O-methyluridine with phosphorothioate linkage
  modified_base 2: mod_base = OTHER; note = 2'-fluorouridine with phosphorothioate linkage
  modified_base 3: mod_base = OTHER; note = 2'-O-methylcytidine
  modified_base 4: mod_base = OTHER; note = 2'-O-methylcytidine
  modified_base 5: mod_base = OTHER; note = 2'-O-methyladenosine
  modified_base 6: mod_base = OTHER; note = 2'-fluoroadenosine
  modified_base 7: mod_base = OTHER; note = 2'-O-methyluridine
  modified_base 8: mod_base = OTHER; note = 2'-fluoroguanosine
  modified_base 9: mod_base = OTHER; note = 2'-fluorocytidine
  modified_base 10: mod_base = OTHER; note = 2'-O-methyluridine
  modified_base 11: mod_base = OTHER; note = 2'-O-methyluridine
  modified_base 12: mod_base = OTHER; note = 2'-O-methyluridine
  modified_base 13: mod_base = OTHER; note = 2'-O-methylguanosine
  modified_base 14: mod_base = OTHER; note = 2'-fluoroguanosine
  modified_base 15: mod_base = OTHER; note = 2'-O-methylcytidine
  modified_base 16: mod_base = OTHER; note = 2'-fluorouridine
  modified_base 17: mod_base = OTHER; note = 2'-O-methyladenosine
  modified_base 18: mod_base = OTHER; note = 2'-O-methylguanosine
  modified_base 19: mod_base = OTHER; note = 2'-O-methylcytidine
  modified_base 20: mod_base = OTHER; note = 2'-O-methyladenosine
  modified_base 21: mod_base = OTHER; note = 2'-O-methylguanosine with phosphorothioate linkage
  modified_base 22: mod_base = OTHER; note = 2'-O-methylcytidine with phosphorothioate linkage
  modified_base 23: mod_base = OTHER; note = 2'-O-methyluridine
ttccaatgctttggctagcagct

SEQ ID NO: 1042 - RNA, 23 nt, synthetic construct
  source 1..23: mol_type = other RNA
  modified_base 1: mod_base = OTHER; note = 5'-vinyl-phosphonate-2'-O-methyluridine with phosphorothioate linkage
  modified_base 2: mod_base = OTHER; note = 2'-fluorocytidine with phosphorothioate linkage
  modified_base 3: mod_base = OTHER; note = 2'-O-methyluridine
  modified_base 4: mod_base = OTHER; note = 2'-O-methylcytidine
  modified_base 5: mod_base = OTHER; note = 2'-O-methylcytidine
  modified_base 6: mod_base = OTHER; note = 2'-fluoroadenosine
  modified_base 7: mod_base = OTHER; note = 2'-O-methyladenosine
  modified_base 8: mod_base = OTHER; note = 2'-fluorouridine
  modified_base 9: mod_base = OTHER; note = 2'-fluoroguanosine
  modified_base 10: mod_base = OTHER; note = 2'-O-methylcytidine
  modified_base 11: mod_base = OTHER; note = 2'-O-methyluridine
  modified_base 12: mod_base = OTHER; note = 2'-O-methyluridine
  modified_base 13: mod_base = OTHER; note = 2'-O-methyluridine
  modified_base 14: mod_base = OTHER; note = 2'-fluoroguanosine
  modified_base 15: mod_base = OTHER; note = 2'-O-methylguanosine
  modified_base 16: mod_base = OTHER; note = 2'-fluorocytidine
  modified_base 17: mod_base = OTHER; note = 2'-O-methyluridine
  modified_base 18: mod_base = OTHER; note = 2'-O-methyladenosine
  modified_base 19: mod_base = OTHER; note = 2'-O-methylguanosine
  modified_base 20: mod_base = OTHER; note = 2'-O-methylcytidine
  modified_base 21: mod_base = OTHER; note = 2'-O-methyladenosine with phosphorothioate linkage
  modified_base 22: mod_base = OTHER; note = 2'-O-methylguanosine with phosphorothioate linkage
  modified_base 23: mod_base = OTHER; note = 2'-O-methylcytidine
tctccaatgctttggctagcagc

SEQ ID NO: 1043 - RNA, 23 nt, synthetic construct
  source 1..23: mol_type = other RNA
  modified_base 1: mod_base = OTHER; note = 5'-vinyl-phosphonate-2'-O-methyluridine with phosphorothioate linkage
  modified_base 2: mod_base = OTHER; note = 2'-fluoroguanosine with phosphorothioate linkage
  modified_base 3: mod_base = OTHER; note = 2'-O-methyluridine
  modified_base 4: mod_base = OTHER; note = 2'-O-methylcytidine
  modified_base 5: mod_base = OTHER; note = 2'-O-methyluridine
  modified_base 6: mod_base = OTHER; note = 2'-fluorocytidine
  modified_base 7: mod_base = OTHER; note = 2'-O-methylcytidine
  modified_base 8: mod_base = OTHER; note = 2'-fluoroadenosine
  modified_base 9: mod_base = OTHER; note = 2'-fluoroadenosine
  modified_base 10: mod_base = OTHER; note = 2'-O-methyluridine
  modified_base 11: mod_base = OTHER; note = 2'-O-methylguanosine
  modified_base 12: mod_base = OTHER; note = 2'-O-methylcytidine
  modified_base 13: mod_base = OTHER; note = 2'-O-methyluridine
  modified_base 14: mod_base = OTHER; note = 2'-fluorouridine
  modified_base 15: mod_base = OTHER; note = 2'-O-methyluridine
  modified_base 16: mod_base = OTHER; note = 2'-fluoroguanosine
  modified_base 17: mod_base = OTHER; note = 2'-O-methylguanosine
  modified_base 18: mod_base = OTHER; note = 2'-O-methylcytidine
  modified_base 19: mod_base = OTHER; note = 2'-O-methyluridine
  modified_base 20: mod_base = OTHER; note = 2'-O-methyladenosine
  modified_base 21: mod_base = OTHER; note = 2'-O-methylguanosine with phosphorothioate linkage
  modified_base 22: mod_base = OTHER; note = 2'-O-methylcytidine with phosphorothioate linkage
  modified_base 23: mod_base = OTHER; note = 2'-O-methyladenosine
tgtctccaatgctttggctagca

SEQ ID NO: 1044 - RNA, 23 nt, synthetic construct
  source 1..23: mol_type = other RNA
  modified_base 1: mod_base = OTHER; note = 5'-vinyl-phosphonate-2'-O-methyluridine with phosphorothioate linkage
  modified_base 2: mod_base = OTHER; note = 2'-fluoroguanosine with phosphorothioate linkage
  modified_base 3: mod_base = OTHER; note = 2'-O-methylguanosine
  modified_base 4: mod_base = OTHER; note = 2'-O-methyluridine
  modified_base 5: mod_base = OTHER; note = 2'-O-methylcytidine
  modified_base 6: mod_base = OTHER; note = 2'-fluorouridine
  modified_base 7: mod_base = OTHER; note = 2'-O-methylcytidine
  modified_base 8: mod_base = OTHER; note = 2'-fluorocytidine
  modified_base 9: mod_base = OTHER; note = 2'-fluoroadenosine
  modified_base 10: mod_base = OTHER; note = 2'-O-methyladenosine
  modified_base 11: mod_base = OTHER; note = 2'-O-methyluridine
  modified_base 12: mod_base = OTHER; note = 2'-O-methylguanosine
  modified_base 13: mod_base = OTHER; note = 2'-O-methylcytidine
  modified_base 14: mod_base = OTHER; note = 2'-fluorouridine
  modified_base 15: mod_base = OTHER; note = 2'-O-methyluridine
  modified_base 16: mod_base = OTHER; note = 2'-fluorouridine
  modified_base 17: mod_base = OTHER; note = 2'-O-methylguanosine
  modified_base 18: mod_base = OTHER; note = 2'-O-methylguanosine
  modified_base 19: mod_base = OTHER; note = 2'-O-methylcytidine
  modified_base 20: mod_base = OTHER; note = 2'-O-methyluridine
  modified_base 21: mod_base = OTHER; note = 2'-O-methyladenosine with phosphorothioate linkage
  modified_base 22: mod_base = OTHER; note = 2'-O-methylguanosine with phosphorothioate linkage
  modified_base 23: mod_base = OTHER; note = 2'-O-methylcytidine
tggtctccaatgctttggctagc

SEQ ID NO: 1045 - RNA, 23 nt, synthetic construct
  source 1..23: mol_type = other RNA
  modified_base 1: mod_base = OTHER; note = 5'-vinyl-phosphonate-2'-O-methyluridine with phosphorothioate linkage
  modified_base 2: mod_base = OTHER; note = 2'-fluoroadenosine with phosphorothioate linkage
  modified_base 3: mod_base = OTHER; note = 2'-O-methylguanosine
  modified_base 4: mod_base = OTHER; note = 2'-O-methylguanosine
  modified_base 5: mod_base = OTHER; note = 2'-O-methyluridine
  modified_base 6: mod_base = OTHER; note = 2'-fluorocytidine
  modified_base 7: mod_base = OTHER; note = 2'-O-methylcytidine
  modified_base 8: mod_base = OTHER; note = 2'-fluoroadenosine
  modified_base 9: mod_base = OTHER; note = 2'-fluoroadenosine
  modified_base 10: mod_base = OTHER; note = 2'-O-methylcytidine
  modified_base 11: mod_base = OTHER; note = 2'-O-methylguanosine
  modified_base 12: mod_base = OTHER; note = 2'-O-methyladenosine
  modified_base 13: mod_base = OTHER; note = 2'-O-methyladenosine
  modified_base 14: mod_base = OTHER; note = 2'-fluoroguanosine
  modified_base 15: mod_base = OTHER; note = 2'-O-methylguanosine
  modified_base 16: mod_base = OTHER; note = 2'-fluoroadenosine
  modified_base 17: mod_base = OTHER; note = 2'-O-methylguanosine
  modified_base 18: mod_base = OTHER; note = 2'-O-methylcytidine
  modified_base 19: mod_base = OTHER; note = 2'-O-methyluridine
  modified_base 20: mod_base = OTHER; note = 2'-O-methylcytidine
  modified_base 21: mod_base = OTHER; note = 2'-O-methylcytidine with phosphorothioate linkage
  modified_base 22: mod_base = OTHER; note = 2'-O-methylcytidine with phosphorothioate linkage
  modified_base 23: mod_base = OTHER; note = 2'-O-methyluridine
taggtccaacgaaggagctccct

SEQ ID NO: 1046 - RNA, 23 nt, synthetic construct
  source 1..23: mol_type = other RNA
  modified_base 1: mod_base = OTHER; note = 5'-vinyl-phosphonate-2'-O-methyluridine with phosphorothioate linkage
  modified_base 2: mod_base = OTHER; note = 2'-fluoroguanosine with phosphorothioate linkage
  modified_base 3: mod_base = OTHER; note = 2'-O-methyladenosine
  modified_base 4: mod_base = OTHER; note = 2'-O-methylguanosine
  modified_base 5: mod_base = OTHER; note = 2'-O-methylguanosine
  modified_base 6: mod_base = OTHER; note = 2'-fluorouridine
  modified_base 7: mod_base = OTHER; note = 2'-O-methylcytidine
  modified_base 8: mod_base = OTHER; note = 2'-fluorocytidine
  modified_base 9: mod_base = OTHER; note = 2'-fluoroadenosine
  modified_base 10: mod_base = OTHER; note = 2'-O-methyladenosine
  modified_base 11: mod_base = OTHER; note = 2'-O-methylcytidine
  modified_base 12: mod_base = OTHER; note = 2'-O-methylguanosine
  modified_base 13: mod_base = OTHER; note = 2'-O-methyladenosine
  modified_base 14: mod_base = OTHER; note = 2'-fluoroadenosine
  modified_base 15: mod_base = OTHER; note = 2'-O-methylguanosine
  modified_base 16: mod_base = OTHER; note = 2'-fluoroguanosine
  modified_base 17: mod_base = OTHER; note = 2'-O-methyladenosine
  modified_base 18: mod_base = OTHER; note = 2'-O-methylguanosine
  modified_base 19: mod_base = OTHER; note = 2'-O-methylcytidine
  modified_base 20: mod_base = OTHER; note = 2'-O-methyluridine
  modified_base 21: mod_base = OTHER; note = 2'-O-methylcytidine with phosphorothioate linkage
  modified_base 22: mod_base = OTHER; note = 2'-O-methylcytidine with phosphorothioate linkage
  modified_base 23: mod_base = OTHER; note = 2'-O-methylcytidine
tgaggtccaacgaaggagctccc

SEQ ID NO: 1047 - RNA, 23 nt, synthetic construct
  source 1..23: mol_type = other RNA
  modified_base 1: mod_base = OTHER; note = 5'-vinyl-phosphonate-2'-O-methyluridine with phosphorothioate linkage
  modified_base 2: mod_base = OTHER; note = 2'-fluoroguanosine with phosphorothioate linkage
  modified_base 3: mod_base = OTHER; note = 2'-O-methylguanosine
  modified_base 4: mod_base = OTHER; note = 2'-O-methyladenosine
  modified_base 5: mod_base = OTHER; note = 2'-O-methylguanosine
  modified_base 6: mod_base = OTHER; note = 2'-fluoroguanosine
  modified_base 7: mod_base = OTHER; note = 2'-O-methyluridine
  modified_base 8: mod_base = OTHER; note = 2'-fluorocytidine
  modified_base 9: mod_base = OTHER; note = 2'-fluorocytidine
  modified_base 10: mod_base = OTHER; note = 2'-O-methyladenosine
  modified_base 11: mod_base = OTHER; note = 2'-O-methyladenosine
  modified_base 12: mod_base = OTHER; note = 2'-O-methylcytidine
  modified_base 13: mod_base = OTHER; note = 2'-O-methylguanosine
  modified_base 14: mod_base = OTHER; note = 2'-fluoroadenosine
  modified_base 15: mod_base = OTHER; note = 2'-O-methyladenosine
  modified_base 16: mod_base = OTHER; note = 2'-fluoroguanosine
  modified_base 17: mod_base = OTHER; note = 2'-O-methylguanosine
  modified_base 18: mod_base = OTHER; note = 2'-O-methyladenosine
  modified_base 19: mod_base = OTHER; note = 2'-O-methylguanosine
  modified_base 20: mod_base = OTHER; note = 2'-O-methylcytidine
  modified_base 21: mod_base = OTHER; note = 2'-O-methyluridine with phosphorothioate linkage
  modified_base 22: mod_base = OTHER; note = 2'-O-methylcytidine with phosphorothioate linkage
  modified_base 23: mod_base = OTHER; note = 2'-O-methylcytidine
tggaggtccaacgaaggagctcc

SEQ ID NO: 1048 - RNA, 23 nt, synthetic construct
  source 1..23: mol_type = other RNA
  modified_base 1: mod_base = OTHER; note = 5'-vinyl-phosphonate-2'-O-methyluridine with phosphorothioate linkage
  modified_base 2: mod_base = OTHER; note = 2'-fluoroguanosine with phosphorothioate linkage
  modified_base 3: mod_base = OTHER; note = 2'-O-methylcytidine
  modified_base 4: mod_base = OTHER; note = 2'-O-methyladenosine
  modified_base 5: mod_base = OTHER; note = 2'-O-methyladenosine
  modified_base 6: mod_base = OTHER; note = 2'-fluorocytidine
  modified_base 7: mod_base = OTHER; note = 2'-O-methyladenosine
  modified_base 8: mod_base = OTHER; note = 2'-fluorouridine
  modified_base 9: mod_base = OTHER; note = 2'-fluoroadenosine
  modified_base 10: mod_base = OTHER; note = 2'-O-methyluridine
  modified_base 11: mod_base = OTHER; note = 2'-O-methylguanosine
  modified_base 12: mod_base = OTHER; note = 2'-O-methylguanosine
  modified_base 13: mod_base = OTHER; note = 2'-O-methylcytidine
  modified_base 14: mod_base = OTHER; note = 2'-fluorocytidine
  modified_base 15: mod_base = OTHER; note = 2'-O-methylcytidine
  modified_base 16: mod_base = OTHER; note = 2'-fluoroadenosine
  modified_base 17: mod_base = OTHER; note = 2'-O-methylguanosine
  modified_base 18: mod_base = OTHER; note = 2'-O-methylguanosine
  modified_base 19: mod_base = OTHER; note = 2'-O-methylcytidine
  modified_base 20: mod_base = OTHER; note = 2'-O-methylcytidine
  modified_base 21: mod_base = OTHER; note = 2'-O-methyluridine with phosphorothioate linkage
  modified_base 22: mod_base = OTHER; note = 2'-O-methyluridine with phosphorothioate linkage
  modified_base 23: mod_base = OTHER; note = 2'-O-methylguanosine
tgcaacatatggcccaggccttg

SEQ ID NO: 1049 - RNA, 23 nt, synthetic construct
  source 1..23: mol_type = other RNA
  modified_base 1: mod_base = OTHER; note = 5'-vinyl-phosphonate-2'-O-methyluridine with phosphorothioate linkage
  modified_base 2: mod_base = OTHER; note = 2'-fluorocytidine with phosphorothioate linkage
  modified_base 3: mod_base = OTHER; note = 2'-O-methyladenosine
  modified_base 4: mod_base = OTHER; note = 2'-O-methylguanosine
  modified_base 5: mod_base = OTHER; note = 2'-O-methylcytidine
  modified_base 6: mod_base = OTHER; note = 2'-fluoroadenosine
  modified_base 7: mod_base = OTHER; note = 2'-O-methyladenosine
  modified_base 8: mod_base = OTHER; note = 2'-fluorocytidine
  modified_base 9: mod_base = OTHER; note = 2'-fluoroadenosine
  modified_base 10: mod_base = OTHER; note = 2'-O-methyluridine
  modified_base 11: mod_base = OTHER; note = 2'-O-methyladenosine
  modified_base 12: mod_base = OTHER; note = 2'-O-methyluridine
  modified_base 13: mod_base = OTHER; note = 2'-O-methylguanosine
  modified_base 14: mod_base = OTHER; note = 2'-fluoroguanosine
  modified_base 15: mod_base = OTHER; note = 2'-O-methylcytidine
  modified_base 16: mod_base = OTHER; note = 2'-fluorocytidine
  modified_base 17: mod_base = OTHER; note = 2'-O-methylcytidine
  modified_base 18: mod_base = OTHER; note = 2'-O-methyladenosine
  modified_base 19: mod_base = OTHER; note = 2'-O-methylguanosine
  modified_base 20: mod_base = OTHER; note = 2'-O-methylguanosine
  modified_base 21: mod_base = OTHER; note = 2'-O-methylcytidine with phosphorothioate linkage
  modified_base 22: mod_base = OTHER; note = 2'-O-methylcytidine with phosphorothioate linkage
  modified_base 23: mod_base = OTHER; note = 2'-O-methyluridine
tcagcaacatatggcccaggcct

SEQ ID NO: 1050 - RNA, 23 nt, synthetic construct
  source 1..23: mol_type = other RNA
  modified_base 1: mod_base = OTHER; note = 5'-vinyl-phosphonate-2'-O-methyluridine with phosphorothioate linkage
  modified_base 2: mod_base = OTHER; note = 2'-fluorocytidine with phosphorothioate linkage
  modified_base 3: mod_base = OTHER; note = 2'-O-methylcytidine
  modified_base 4: mod_base = OTHER; note = 2'-O-methylcytidine
  modified_base 5: mod_base = OTHER; note = 2'-O-methyladenosine
  modified_base 6: mod_base = OTHER; note = 2'-fluoroguanosine
  modified_base 7: mod_base = OTHER; note = 2'-O-methylcytidine
  modified_base 8: mod_base = OTHER; note = 2'-fluoroadenosine
  modified_base 9: mod_base = OTHER; note = 2'-fluoroadenosine
  modified_base 10: mod_base = OTHER; note = 2'-O-methylcytidine
  modified_base 11: mod_base = OTHER; note = 2'-O-methyladenosine
  modified_base 12: mod_base = OTHER; note = 2'-O-methyluridine
  modified_base 13: mod_base = OTHER; note = 2'-O-methyladenosine
  modified_base 14: mod_base = OTHER; note = 2'-fluorouridine
  modified_base 15: mod_base = OTHER; note = 2'-O-methylguanosine
  modified_base 16: mod_base = OTHER; note = 2'-fluoroguanosine
  modified_base 17: mod_base = OTHER; note = 2'-O-methylcytidine
  modified_base 18: mod_base = OTHER; note = 2'-O-methylcytidine
  modified_base 19: mod_base = OTHER; note = 2'-O-methylcytidine
  modified_base 20: mod_base = OTHER; note = 2'-O-methyladenosine
  modified_base 21: mod_base = OTHER; note = 2'-O-methylguanosine with phosphorothioate linkage
  modified_base 22: mod_base = OTHER; note = 2'-O-methylguanosine with phosphorothioate linkage
  modified_base 23: mod_base = OTHER; note = 2'-O-methylcytidine
tcccagcaacatatggcccaggc

SEQ ID NO: 1051 - RNA, 23 nt, synthetic construct
  source 1..23: mol_type = other RNA
  modified_base 1: mod_base = OTHER; note = 5'-vinyl-phosphonate-2'-O-methyluridine with phosphorothioate linkage
  modified_base 2: mod_base = OTHER; note = 2'-fluorouridine with phosphorothioate linkage
  modified_base 3: mod_base = OTHER; note = 2'-O-methylcytidine
  modified_base 4: mod_base = OTHER; note = 2'-O-methylcytidine
  modified_base 5: mod_base = OTHER; note = 2'-O-methylcytidine
  modified_base 6: mod_base = OTHER; note = 2'-fluoroadenosine
  modified_base 7: mod_base = OTHER; note = 2'-O-methylguanosine
  modified_base 8: mod_base = OTHER; note = 2'-fluorocytidine
  modified_base 9: mod_base = OTHER; note = 2'-fluoroadenosine
  modified_base 10: mod_base = OTHER; note = 2'-O-methyladenosine
  modified_base 11: mod_base = OTHER; note = 2'-O-methylcytidine
  modified_base 12: mod_base = OTHER; note = 2'-O-methyladenosine
  modified_base 13: mod_base = OTHER; note = 2'-O-methyluridine
  modified_base 14: mod_base = OTHER; note = 2'-fluoroadenosine
  modified_base 15: mod_base = OTHER; note = 2'-O-methyluridine
  modified_base 16: mod_base = OTHER; note = 2'-fluoroguanosine
  modified_base 17: mod_base = OTHER; note = 2'-O-methylguanosine
  modified_base 18: mod_base = OTHER; note = 2'-O-methylcytidine
  modified_base 19: mod_base = OTHER; note = 2'-O-methylcytidine
  modified_base 20: mod_base = OTHER; note = 2'-O-methylcytidine
  modified_base 21: mod_base = OTHER; note = 2'-O-methyladenosine with phosphorothioate linkage
  modified_base 22: mod_base = OTHER; note = 2'-O-methylguanosine with phosphorothioate linkage
  modified_base 23: mod_base = OTHER; note = 2'-O-methylguanosine
ttcccagcaacatatggcccagg

SEQ ID NO: 1052 - RNA, 23 nt, synthetic construct
  source 1..23: mol_type = other RNA
  modified_base 1: mod_base = OTHER; note = 5'-vinyl-phosphonate-2'-O-methyluridine with phosphorothioate linkage
  modified_base 2: mod_base = OTHER; note = 2'-fluoroguanosine with phosphorothioate linkage
  modified_base 3: mod_base = OTHER; note = 2'-O-methyladenosine
  modified_base 4: mod_base = OTHER; note = 2'-O-methylguanosine
  modified_base 5: mod_base = OTHER; note = 2'-O-methylguanosine
  modified_base 6: mod_base = OTHER; note = 2'-fluoroadenosine
  modified_base 7: mod_base = OTHER; note = 2'-O-methyladenosine
  modified_base 8: mod_base = OTHER; note = 2'-fluoroadenosine
  modified_base 9: mod_base = OTHER; note = 2'-fluorouridine
  modified_base 10: mod_base = OTHER; note = 2'-O-methyluridine
  modified_base 11: mod_base = OTHER; note = 2'-O-methylcytidine
  modified_base 12: mod_base = OTHER; note = 2'-O-methylcytidine
  modified_base 13: mod_base = OTHER; note = 2'-O-methylcytidine
  modified_base 14: mod_base = OTHER; note = 2'-fluoroadenosine
  modified_base 15: mod_base = OTHER; note = 2'-O-methylguanosine
  modified_base 16: mod_base = OTHER; note = 2'-fluorocytidine
  modified_base 17: mod_base = OTHER; note = 2'-O-methyladenosine
  modified_base 18: mod_base = OTHER; note = 2'-O-methyladenosine
  modified_base 19: mod_base = OTHER; note = 2'-O-methylcytidine
  modified_base 20: mod_base = OTHER; note = 2'-O-methyladenosine
  modified_base 21: mod_base = OTHER; note = 2'-O-methyluridine with phosphorothioate linkage
  modified_base 22: mod_base = OTHER; note = 2'-O-methyladenosine with phosphorothioate linkage
  modified_base 23: mod_base = OTHER; note = 2'-O-methyluridine
tgaggaaattcccagcaacatat

SEQ ID NO: 1053 - RNA, 23 nt, synthetic construct
  source 1..23: mol_type = other RNA
  modified_base 1: mod_base = OTHER; note = 5'-vinyl-phosphonate-2'-O-methyluridine with phosphorothioate linkage
  modified_base 2: mod_base = OTHER; note = 2'-fluoroadenosine with phosphorothioate linkage
  modified_base 3: mod_base = OTHER; note = 2'-O-methylguanosine
  modified_base 4: mod_base = OTHER; note = 2'-O-methylguanosine
  modified_base 5: mod_base = OTHER; note = 2'-O-methylguanosine
  modified_base 6: mod_base = OTHER; note = 2'-fluorouridine
  modified_base 7: mod_base = OTHER; note = 2'-O-methylguanosine
  modified_base 8: mod_base = OTHER; note = 2'-fluoroguanosine
  modified_base 9: mod_base = OTHER; note = 2'-fluoroadenosine
  modified_base 10: mod_base = OTHER; note = 2'-O-methylguanosine
  modified_base 11: mod_base = OTHER; note = 2'-O-methylguanosine
  modified_base 12: mod_base = OTHER; note = 2'-O-methyladenosine
  modified_base 13: mod_base = OTHER; note = 2'-O-methyladenosine
  modified_base 14: mod_base = OTHER; note = 2'-fluoroadenosine
  modified_base 15: mod_base = OTHER; note = 2'-O-methyluridine
  modified_base 16: mod_base = OTHER; note = 2'-fluorouridine
  modified_base 17: mod_base = OTHER; note = 2'-O-methylcytidine
  modified_base 18: mod_base = OTHER; note = 2'-O-methylcytidine
  modified_base 19: mod_base = OTHER; note = 2'-O-methylcytidine
  modified_base 20: mod_base = OTHER; note = 2'-O-methyladenosine
  modified_base 21: mod_base = OTHER; note = 2'-O-methylguanosine with phosphorothioate linkage
  modified_base 22: mod_base = OTHER; note = 2'-O-methylcytidine with phosphorothioate linkage
  modified_base 23: mod_base = OTHER; note = 2'-O-methyladenosine
tagggtggaggaaattcccagca

SEQ ID NO: 1054 - RNA, 23 nt, synthetic construct
  source 1..23: mol_type = other RNA
  modified_base 1: mod_base = OTHER; note = 5'-vinyl-phosphonate-2'-O-methyluridine with phosphorothioate linkage
  modified_base 2: mod_base = OTHER; note = 2'-fluorocytidine with phosphorothioate linkage
  modified_base 3: mod_base = OTHER; note = 2'-O-methyladenosine
  modified_base 4: mod_base = OTHER; note = 2'-O-methyluridine
  modified_base 5: mod_base = OTHER; note = 2'-O-methylguanosine
  modified_base 6: mod_base = OTHER; note = 2'-fluoroadenosine
  modified_base 7: mod_base = OTHER; note = 2'-O-methylcytidine
  modified_base 8: mod_base = OTHER; note = 2'-fluoroguanosine
  modified_base 9: mod_base = OTHER; note = 2'-fluoroadenosine
  modified_base 10: mod_base = OTHER; note = 2'-O-methyladenosine
  modified_base 11: mod_base = OTHER; note = 2'-O-methylguanosine
  modified_base 12: mod_base = OTHER; note = 2'-O-methylguanosine
  modified_base 13: mod_base = OTHER; note = 2'-O-methylguanosine
  modified_base 14: mod_base = OTHER; note = 2'-fluorouridine
  modified_base 15: mod_base = OTHER; note = 2'-O-methylguanosine
  modified_base 16: mod_base = OTHER; note = 2'-fluoroguanosine
  modified_base 17: mod_base = OTHER; note = 2'-O-methyladenosine
  modified_base 18: mod_base = OTHER; note = 2'-O-methylguanosine
  modified_base 19: mod_base = OTHER; note = 2'-O-methylguanosine
  modified_base 20: mod_base = OTHER; note = 2'-O-methyladenosine
  modified_base 21: mod_base = OTHER; note = 2'-O-methyladenosine with phosphorothioate linkage
  modified_base 22: mod_base = OTHER; note = 2'-O-methyladenosine with phosphorothioate linkage
  modified_base 23: mod_base = OTHER; note = 2'-O-methyluridine
tcatgacgaagggtggaggaaat

SEQ ID NO: 1055 - RNA, 23 nt, synthetic construct
  source 1..23: mol_type = other RNA
  modified_base 1: mod_base = OTHER; note = 5'-vinyl-phosphonate-2'-O-methyluridine with phosphorothioate linkage
  modified_base 2: mod_base = OTHER; note = 2'-fluorouridine with phosphorothioate linkage
  modified_base 3: mod_base = OTHER; note = 2'-O-methyladenosine
  modified_base 4: mod_base = OTHER; note = 2'-O-methylguanosine
  modified_base 5: mod_base = OTHER; note = 2'-O-methylguanosine
  modified_base 6: mod_base = OTHER; note = 2'-fluoroadenosine
  modified_base 7: mod_base = OTHER; note = 2'-O-methyladenosine
  modified_base 8: mod_base = OTHER; note = 2'-fluorouridine
  modified_base 9: mod_base = OTHER; note = 2'-fluoroguanosine
  modified_base 10: mod_base = OTHER; note = 2'-O-methylguanosine
  modified_base 11: mod_base = OTHER; note = 2'-O-methyladenosine
  modified_base 12: mod_base = OTHER; note = 2'-O-methylguanosine
  modified_base 13: mod_base = OTHER; note = 2'-O-methylguanosine
  modified_base 14: mod_base = OTHER; note = 2'-fluorocytidine
  modified_base 15: mod_base = OTHER; note = 2'-O-methylguanosine
  modified_base 16: mod_base = OTHER; note = 2'-fluoroguanosine
  modified_base 17: mod_base = OTHER; note = 2'-O-methylcytidine
  modified_base 18: mod_base = OTHER; note = 2'-O-methylcytidine
  modified_base 19: mod_base = OTHER; note = 2'-O-methylcytidine
  modified_base 20: mod_base = OTHER; note = 2'-O-methyluridine
  modified_base 21: mod_base = OTHER; note = 2'-O-methyluridine with phosphorothioate linkage
  modified_base 22: mod_base = OTHER; note = 2'-O-methylcytidine with phosphorothioate linkage
  modified_base 23: mod_base = OTHER; note = 2'-O-methyluridine
ttaggaatggaggcggcccttct

SEQ ID NO: 1056 - RNA, 23 nt, synthetic construct
  source 1..23: mol_type = other RNA
  modified_base 1: mod_base = OTHER; note = 5'-vinyl-phosphonate-2'-O-methyluridine with phosphorothioate linkage
  modified_base 2: mod_base = OTHER; note = 2'-fluorouridine with phosphorothioate linkage
  modified_base 3: mod_base = OTHER; note = 2'-O-methyladenosine
  modified_base 4: mod_base = OTHER; note = 2'-O-methylguanosine
  modified_base 5: mod_base = OTHER; note = 2'-O-methyluridine
  modified_base 6: mod_base = OTHER; note = 2'-fluoroadenosine
  modified_base 7: mod_base = OTHER; note = 2'-O-methylguanosine
  modified_base 8: mod_base = OTHER; note = 2'-fluoroguanosine
  modified_base 9: mod_base = OTHER; note = 2'-fluoroadenosine
  modified_base 10: mod_base = OTHER; note = 2'-O-methyladenosine
  modified_base 11: mod_base = OTHER; note = 2'-O-methyluridine
  modified_base 12: mod_base = OTHER; note = 2'-O-methylguanosine
  modified_base 13: mod_base = OTHER; note = 2'-O-methylguanosine
  modified_base 14: mod_base = OTHER; note = 2'-fluoroadenosine
  modified_base 15: mod_base = OTHER; note = 2'-O-methylguanosine
  modified_base 16: mod_base = OTHER; note = 2'-fluoroguanosine
  modified_base 17: mod_base = OTHER; note = 2'-O-methylcytidine
  modified_base 18: mod_base = OTHER; note = 2'-O-methylguanosine
  modified_base 19: mod_base = OTHER; note = 2'-O-methylguanosine
  modified_base 20: mod_base = OTHER; note = 2'-O-methylcytidine
  modified_base 21: mod_base = OTHER; note = 2'-O-methylcytidine with phosphorothioate linkage
  modified_base 22: mod_base = OTHER; note = 2'-O-methylcytidine with phosphorothioate linkage
  modified_base 23: mod_base = OTHER; note = 2'-O-methyluridine
ttagtaggaatggaggcggccct

SEQ ID NO: 1057 - RNA, 23 nt, synthetic construct
  source 1..23: mol_type = other RNA
  modified_base 1: mod_base = OTHER; note = 5'-vinyl-phosphonate-2'-O-methyluridine with phosphorothioate linkage
  modified_base 2: mod_base = OTHER; note = 2'-fluoroguanosine with phosphorothioate linkage
  modified_base 3: mod_base = OTHER; note = 2'-O-methylcytidine
  modified_base 4: mod_base = OTHER; note = 2'-O-methyluridine
  modified_base 5: mod_base = OTHER; note = 2'-O-methylguanosine
  modified_base 6: mod_base = OTHER; note = 2'-fluorouridine
  modified_base 7: mod_base = OTHER; note = 2'-O-methylcytidine
  modified_base 8: mod_base = OTHER; note = 2'-fluoroadenosine
  modified_base 9: mod_base = OTHER; note = 2'-fluorouridine
  modified_base 10: mod_base = OTHER; note = 2'-O-methyladenosine
  modified_base 11: mod_base = OTHER; note = 2'-O-methylguanosine
  modified_base 12: mod_base = OTHER; note = 2'-O-methyluridine
  modified_base 13: mod_base = OTHER; note = 2'-O-methylcytidine
  modified_base 14: mod_base = OTHER; note = 2'-fluorouridine
  modified_base 15: mod_base = OTHER; note = 2'-O-methyluridine
  modified_base 16: mod_base = OTHER; note = 2'-fluorouridine
  modified_base 17: mod_base = OTHER; note = 2'-O-methylguanosine
  modified_base 18: mod_base = OTHER; note = 2'-O-methylcytidine
  modified_base 19: mod_base = OTHER; note = 2'-O-methyladenosine
  modified_base 20: mod_base = OTHER; note = 2'-O-methylguanosine
  modified_base 21: mod_base = OTHER; note = 2'-O-methyluridine with phosphorothioate linkage
  modified_base 22: mod_base = OTHER; note = 2'-O-methylguanosine with phosphorothioate linkage
  modified_base 23: mod_base = OTHER; note = 2'-O-methylguanosine
tgctgtcatagtctttgcagtgg

SEQ ID NO: 1058 - RNA, 23 nt, synthetic construct
  source 1..23: mol_type = other RNA
  modified_base 1: mod_base = OTHER; note = 5'-vinyl-phosphonate-2'-O-methyluridine with phosphorothioate linkage
  modified_base 2: mod_base = OTHER; note = 2'-fluoroguanosine with phosphorothioate linkage
  modified_base 3: mod_base = OTHER; note = 2'-O-methylguanosine
  modified_base 4: mod_base = OTHER; note = 2'-O-methyluridine
  modified_base 5: mod_base = OTHER; note = 2'-O-methylcytidine
  modified_base 6: mod_base = OTHER; note = 2'-fluorocytidine
  modified_base 7: mod_base = OTHER; note = 2'-O-methyluridine
  modified_base 8: mod_base = OTHER; note = 2'-fluoroguanosine
  modified_base 9: mod_base = OTHER; note = 2'-fluoroadenosine
  modified_base 10: mod_base = OTHER; note = 2'-O-methyladenosine
  modified_base 11: mod_base = OTHER; note = 2'-O-methyladenosine
  modified_base 12: mod_base = OTHER; note = 2'-O-methyluridine
  modified_base 13: mod_base = OTHER; note = 2'-O-methyluridine
  modified_base 14: mod_base = OTHER; note = 2'-fluorouridine
  modified_base 15: mod_base = OTHER; note = 2'-O-methylguanosine
  modified_base 16: mod_base = OTHER; note = 2'-fluoroadenosine
  modified_base 17: mod_base = OTHER; note = 2'-O-methyluridine
  modified_base 18: mod_base = OTHER; note = 2'-O-methylguanosine
  modified_base 19: mod_base = OTHER; note = 2'-O-methylcytidine
  modified_base 20: mod_base = OTHER; note = 2'-O-methyluridine
  modified_base 21: mod_base = OTHER; note = 2'-O-methylguanosine with phosphorothioate linkage
  modified_base 22: mod_base = OTHER; note = 2'-O-methyluridine with phosphorothioate linkage
  modified_base 23: mod_base = OTHER; note = 2'-O-methylcytidine
tggtcctgaaatttgatgctgtc

SEQ ID NO: 1059 - RNA, 23 nt, synthetic construct
  source 1..23: mol_type = other RNA
  modified_base 1: mod_base = OTHER; note = 5'-vinyl-phosphonate-2'-O-methyluridine with phosphorothioate linkage
  modified_base 2: mod_base = OTHER; note = 2'-fluoroguanosine with phosphorothioate linkage
  modified_base 3: mod_base = OTHER; note = 2'-O-methyluridine
  modified_base 4: mod_base = OTHER; note = 2'-O-methyladenosine
  modified_base 5: mod_base = OTHER; note = 2'-O-methylcytidine
  modified_base 6: mod_base = OTHER; note = 2'-fluorouridine
  modified_base 7: mod_base = OTHER; note = 2'-O-methylguanosine
  modified_base 8: mod_base = OTHER; note = 2'-fluorouridine
  modified_base 9: mod_base = OTHER; note = 2'-fluorocytidine
  modified_base 10: mod_base = OTHER; note = 2'-O-methyluridine
  modified_base 11: mod_base = OTHER; note = 2'-O-methylguanosine
  modified_base 12: mod_base = OTHER; note = 2'-O-methylcytidine
  modified_base 13: mod_base = OTHER; note = 2'-O-methyladenosine
  modified_base 14: mod_base = OTHER; note = 2'-fluoroguanosine
  modified_base 15: mod_base = OTHER; note = 2'-O-methylguanosine
  modified_base 16: mod_base = OTHER; note = 2'-fluorouridine
  modified_base 17: mod_base = OTHER; note = 2'-O-methylcytidine
  modified_base 18: mod_base = OTHER; note = 2'-O-methylcytidine
  modified_base 19: mod_base = OTHER; note = 2'-O-methyluridine
  modified_base 20: mod_base = OTHER; note = 2'-O-methylguanosine
  modified_base 21: mod_base = OTHER; note = 2'-O-methyladenosine with phosphorothioate linkage
  modified_base 22: mod_base = OTHER; note = 2'-O-methyladenosine with phosphorothioate linkage
  modified_base 23: mod_base = OTHER; note = 2'-O-methyladenosine
tgtactgtctgcaggtcctgaaa

SEQ ID NO: 1060 - RNA, 23 nt, synthetic construct
  source 1..23: mol_type = other RNA
  modified_base 1: mod_base = OTHER; note = 5'-vinyl-phosphonate-2'-O-methyluridine with phosphorothioate linkage
  modified_base 2: mod_base = OTHER; note = 2'-fluoroadenosine with phosphorothioate linkage
  modified_base 3: mod_base = OTHER; note = 2'-O-methyluridine
  modified_base 4: mod_base = OTHER; note = 2'-O-methylcytidine
  modified_base 5: mod_base = OTHER; note = 2'-O-methyluridine
  modified_base 6: mod_base = OTHER; note = 2'-fluoroadenosine
  modified_base 7: mod_base = OTHER; note = 2'-O-methylguanosine
  modified_base 8: mod_base = OTHER; note = 2'-fluorocytidine
  modified_base 9: mod_base = OTHER; note = 2'-fluorocytidine
  modified_base 10: mod_base = OTHER; note = 2'-O-methyluridine
  modified_base 11: mod_base = OTHER; note = 2'-O-methylguanosine
  modified_base 12: mod_base = OTHER; note = 2'-O-methyluridine
  modified_base 13: mod_base = OTHER; note = 2'-O-methyladenosine
  modified_base 14: mod_base = OTHER; note = 2'-fluorocytidine
  modified_base 15: mod_base = OTHER; note = 2'-O-methyluridine
  modified_base 16: mod_base = OTHER; note = 2'-fluoroguanosine
  modified_base 17: mod_base = OTHER; note = 2'-O-methyluridine
  modified_base 18: mod_base = OTHER; note = 2'-O-methylcytidine
  modified_base 19: mod_base = OTHER; note = 2'-O-methyluridine
  modified_base 20: mod_base = OTHER; note = 2'-O-methylguanosine
  modified_base 21: mod_base = OTHER; note = 2'-O-methylcytidine with phosphorothioate linkage
  modified_base 22: mod_base = OTHER; note = 2'-O-methyladenosine with phosphorothioate linkage
  modified_base 23: mod_base = OTHER; note = 2'-O-methylguanosine
tatctagcctgtactgtctgcag

SEQ ID NO: 1061 - RNA, 23 nt, synthetic construct
  source 1..23: mol_type = other RNA
  modified_base 1: mod_base = OTHER; note = 5'-vinyl-phosphonate-2'-O-methyluridine with phosphorothioate linkage
  modified_base 2: mod_base = OTHER; note = 2'-fluorouridine with phosphorothioate linkage
  modified_base 3: mod_base = OTHER; note = 2'-O-methyladenosine
  modified_base 4: mod_base = OTHER; note = 2'-O-methyluridine
  modified_base 5: mod_base = OTHER; note = 2'-O-methylcytidine
  modified_base 6: mod_base = OTHER; note = 2'-fluorouridine
  modified_base 7: mod_base = OTHER; note = 2'-O-methyladenosine
  modified_base 8: mod_base = OTHER; note = 2'-fluoroguanosine
  modified_base 9: mod_base = OTHER; note = 2'-fluorocytidine
  modified_base 10: mod_base = OTHER; note = 2'-O-methylcytidine
  modified_base 11: mod_base = OTHER; note = 2'-O-methyluridine
  modified_base 12: mod_base = OTHER; note = 2'-O-methylguanosine
  modified_base 13: mod_base = OTHER; note = 2'-O-methyluridine
  modified_base 14: mod_base = OTHER; note = 2'-fluoroadenosine
  modified_base 15: mod_base = OTHER; note = 2'-O-methylcytidine
  modified_base 16: mod_base = OTHER; note = 2'-fluorouridine
  modified_base 17: mod_base = OTHER; note = 2'-O-methylguanosine
  modified_base 18: mod_base = OTHER; note = 2'-O-methyluridine
  modified_base 19: mod_base = OTHER; note = 2'-O-methylcytidine
  modified_base 20: mod_base = OTHER; note = 2'-O-methyluridine
  modified_base 21: mod_base = OTHER; note = 2'-O-methylguanosine with phosphorothioate linkage
  modified_base 22: mod_base = OTHER; note = 2'-O-methylcytidine with phosphorothioate linkage
  modified_base 23: mod_base = OTHER; note = 2'-O-methyladenosine
ttatctagcctgtactgtctgca

SEQ ID NO: 1062 - RNA, 23 nt, synthetic construct
  source 1..23: mol_type = other RNA
  modified_base 1: mod_base = OTHER; note = 5'-vinyl-phosphonate-2'-O-methyluridine with phosphorothioate linkage
  modified_base 2: mod_base = OTHER; note = 2'-fluorouridine with phosphorothioate linkage
  modified_base 3: mod_base = OTHER; note = 2'-O-methyluridine
  modified_base 4: mod_base = OTHER; note = 2'-O-methyladenosine
  modified_base 5: mod_base = OTHER; note = 2'-O-methyluridine
  modified_base 6: mod_base = OTHER; note = 2'-fluorocytidine
  modified_base 7: mod_base = OTHER; note = 2'-O-methyluridine
  modified_base 8: mod_base = OTHER; note = 2'-fluoroadenosine
  modified_base 9: mod_base = OTHER; note = 2'-fluoroguanosine
  modified_base 10: mod_base = OTHER; note = 2'-O-methylcytidine
  modified_base 11: mod_base = OTHER; note = 2'-O-methylcytidine
  modified_base 12: mod_base = OTHER; note = 2'-O-methyluridine
  modified_base 13: mod_base = OTHER; note = 2'-O-methylguanosine
  modified_base 14: mod_base = OTHER; note = 2'-fluorouridine
  modified_base 15: mod_base = OTHER; note = 2'-O-methyladenosine
  modified_base 16: mod_base = OTHER; note = 2'-fluorocytidine
  modified_base 17: mod_base = OTHER; note = 2'-O-methyluridine
  modified_base 18: mod_base = OTHER; note = 2'-O-methylguanosine
  modified_base 19: mod_base = OTHER; note = 2'-O-methyluridine
  modified_base 20: mod_base = OTHER; note = 2'-O-methylcytidine
  modified_base 21: mod_base = OTHER; note = 2'-O-methyluridine with phosphorothioate linkage
  modified_base 22: mod_base = OTHER; note = 2'-O-methylguanosine with phosphorothioate linkage
  modified_base 23: mod_base = OTHER; note = 2'-O-methylcytidine
tttatctagcctgtactgtctgc

SEQ ID NO: 1063 - RNA, 23 nt, synthetic construct
  source 1..23: mol_type = other RNA
  modified_base 1: mod_base = OTHER; note = 5'-vinyl-phosphonate-2'-O-methyluridine with phosphorothioate linkage
  modified_base 2: mod_base = OTHER; note = 2'-fluoroguanosine with phosphorothioate linkage
  modified_base 3: mod_base = OTHER; note = 2'-O-methylcytidine
  modified_base 4: mod_base = OTHER; note = 2'-O-methylcytidine
  modified_base 5: mod_base = OTHER; note = 2'-O-methyluridine
  modified_base 6: mod_base = OTHER; note = 2'-fluorouridine
  modified_base 7: mod_base = OTHER; note = 2'-O-methyluridine
  modified_base 8: mod_base = OTHER; note = 2'-fluorocytidine
  modified_base 9: mod_base = OTHER; note = 2'-fluoroadenosine
  modified_base 10: mod_base = OTHER; note = 2'-O-methylguanosine
  modified_base 11: mod_base = OTHER; note = 2'-O-methylguanosine
  modified_base 12: mod_base = OTHER; note = 2'-O-methylguanosine
  modified_base 13: mod_base = OTHER; note = 2'-O-methylcytidine
  modified_base 14: mod_base = OTHER; note = 2'-fluoroadenosine
  modified_base 15: mod_base = OTHER; note = 2'-O-methyladenosine
  modified_base 16: mod_base = OTHER; note = 2'-fluoroguanosine
  modified_base 17: mod_base = OTHER; note = 2'-O-methyluridine
  modified_base 18: mod_base = OTHER; note = 2'-O-methylguanosine
  modified_base 19: mod_base = OTHER; note = 2'-O-methylguanosine
  modified_base 20: mod_base = OTHER; note = 2'-O-methylguanosine
  modified_base 21: mod_base = OTHER; note = 2'-O-methyladenosine with phosphorothioate linkage
  modified_base 22: mod_base = OTHER; note = 2'-O-methylguanosine with phosphorothioate linkage
  modified_base 23: mod_base = OTHER; note = 2'-O-methylguanosine
tgcctttcagggcaagtgggagg

SEQ ID NO: 1064 - RNA, 23 nt, synthetic construct
  source 1..23: mol_type = other RNA
  modified_base 1: mod_base = OTHER; note = 5'-vinyl-phosphonate-2'-O-methyluridine with phosphorothioate linkage
  modified_base 2: mod_base = OTHER; note = 2'-fluoroguanosine with phosphorothioate linkage
  modified_base 3: mod_base = OTHER; note = 2'-O-methylguanosine
  modified_base 4: mod_base = OTHER; note = 2'-O-methylguanosine
  modified_base 5: mod_base = OTHER; note = 2'-O-methyladenosine
  modified_base 6: mod_base = OTHER; note = 2'-fluorouridine
  modified_base 7: mod_base = OTHER; note = 2'-O-methyluridine
  modified_base 8: mod_base = OTHER; note = 2'-fluoroadenosine
  modified_base 9: mod_base = OTHER; note = 2'-fluoroguanosine
  modified_base 10: mod_base = OTHER; note = 2'-O-methyladenosine
  modified_base 11: mod_base = OTHER; note = 2'-O-methyluridine
  modified_base 12: mod_base = OTHER; note = 2'-O-methylguanosine
  modified_base 13: mod_base = OTHER; note = 2'-O-methyluridine
  modified_base 14: mod_base = OTHER; note = 2'-fluoroadenosine
  modified_base 15: mod_base = OTHER; note = 2'-O-methylguanosine
  modified_base 16: mod_base = OTHER; note = 2'-fluorocytidine
  modified_base 17: mod_base = OTHER; note = 2'-O-methyladenosine
  modified_base 18: mod_base = OTHER; note = 2'-O-methylguanosine
  modified_base 19: mod_base = OTHER; note = 2'-O-methylcytidine
  modified_base 20: mod_base = OTHER; note = 2'-O-methyladenosine
  modified_base 21: mod_base = OTHER; note = 2'-O-methylguanosine with phosphorothioate linkage
  modified_base 22: mod_base = OTHER; note = 2'-O-methyluridine with phosphorothioate linkage
  modified_base 23: mod_base = OTHER; note = 2'-O-methylcytidine
tgggattagatgtagcagcagtc

SEQ ID NO: 1065 - RNA, 23 nt, synthetic construct
  source 1..23: mol_type = other RNA
  modified_base 1: mod_base = OTHER; note = 5'-vinyl-phosphonate-2'-O-methyluridine with phosphorothioate linkage
  modified_base 2: mod_base = OTHER; note = 2'-fluoroguanosine with phosphorothioate linkage
  modified_base 3: mod_base = OTHER; note = 2'-O-methylguanosine
  modified_base 4: mod_base = OTHER; note = 2'-O-methylguanosine
  modified_base 5: mod_base = OTHER; note = 2'-O-methylguanosine
  modified_base 6: mod_base = OTHER; note = 2'-fluoroadenosine
  modified_base 7: mod_base = OTHER; note = 2'-O-methyluridine
  modified_base 8: mod_base = OTHER; note = 2'-fluorouridine
  modified_base 9: mod_base = OTHER; note = 2'-fluoroadenosine
  modified_base 10: mod_base = OTHER; note = 2'-O-methylguanosine
  modified_base 11: mod_base = OTHER; note = 2'-O-methyladenosine
  modified_base 12: mod_base = OTHER; note = 2'-O-methyluridine
  modified_base 13: mod_base = OTHER; note = 2'-O-methylguanosine
  modified_base 14: mod_base = OTHER; note = 2'-fluorouridine
  modified_base 15: mod_base = OTHER; note = 2'-O-methyladenosine
  modified_base 16: mod_base = OTHER; note = 2'-fluoroguanosine
  modified_base 17: mod_base = OTHER; note = 2'-O-methylcytidine
  modified_base 18: mod_base = OTHER; note = 2'-O-methyladenosine
  modified_base 19: mod_base = OTHER; note = 2'-O-methylguanosine
  modified_base 20: mod_base = OTHER; note = 2'-O-methylcytidine
  modified_base 21: mod_base = OTHER; note = 2'-O-methyladenosine with phosphorothioate linkage
  modified_base 22: mod_base = OTHER; note = 2'-O-methylguanosine with phosphorothioate linkage
  modified_base 23: mod_base = OTHER; note = 2'-O-methyluridine
tggggattagatgtagcagcagt

SEQ ID NO: 1066 - RNA, 23 nt, synthetic construct
  source 1..23: mol_type = other RNA
  modified_base 1: mod_base = OTHER; note = 5'-vinyl-phosphonate-2'-O-methyluridine with phosphorothioate linkage
  modified_base 2: mod_base = OTHER; note = 2'-fluoroadenosine with phosphorothioate linkage
  modified_base 3: mod_base = OTHER; note = 2'-O-methylguanosine
  modified_base 4: mod_base = OTHER; note = 2'-O-methylguanosine
  modified_base 5: mod_base = OTHER; note = 2'-O-methylguanosine
  modified_base 6: mod_base = OTHER; note = 2'-fluoroguanosine
  modified_base 7: mod_base = OTHER; note = 2'-O-methyladenosine
  modified_base 8: mod_base = OTHER; note = 2'-fluorouridine
  modified_base 9: mod_base = OTHER; note = 2'-fluorouridine
  modified_base 10: mod_base = OTHER; note = 2'-O-methyladenosine
  modified_base 11: mod_base = OTHER; note = 2'-O-methylguanosine
  modified_base 12: mod_base = OTHER; note = 2'-O-methyladenosine
  modified_base 13: mod_base = OTHER; note = 2'-O-methyluridine
  modified_base 14: mod_base = OTHER; note = 2'-fluoroguanosine
  modified_base 15: mod_base = OTHER; note = 2'-O-methyluridine
  modified_base 16: mod_base = OTHER; note = 2'-fluoroadenosine
  modified_base 17: mod_base = OTHER; note = 2'-O-methylguanosine
  modified_base 18: mod_base = OTHER; note = 2'-O-methylcytidine
  modified_base 19: mod_base = OTHER; note = 2'-O-methyladenosine
  modified_base 20: mod_base = OTHER; note = 2'-O-methylguanosine
  modified_base 21: mod_base = OTHER; note = 2'-O-methylcytidine with phosphorothioate linkage
  modified_base 22: mod_base = OTHER; note = 2'-O-methyladenosine with phosphorothioate linkage
  modified_base 23: mod_base = OTHER; note = 2'-O-methylguanosine
taggggattagatgtagcagcag

SEQ ID NO: 1067 - RNA, 23 nt, synthetic construct
  source 1..23: mol_type = other RNA
  modified_base 1: mod_base = OTHER; note = 5'-vinyl-phosphonate-2'-O-methyluridine with phosphorothioate linkage
  modified_base 2: mod_base = OTHER; note = 2'-fluoroadenosine with phosphorothioate linkage
  modified_base 3: mod_base = OTHER; note = 2'-O-methyluridine
  modified_base 4: mod_base = OTHER; note = 2'-O-methyluridine
  modified_base 5: mod_base = OTHER; note = 2'-O-methylguanosine
  modified_base 6: mod_base = OTHER; note = 2'-fluoroguanosine
  modified_base 7: mod_base = OTHER; note = 2'-O-methyluridine
  modified_base 8: mod_base = OTHER; note = 2'-fluoroadenosine
  modified_base 9: mod_base = OTHER; note = 2'-fluoroguanosine
  modified_base 10: mod_base = OTHER; note = 2'-O-methylguanosine
  modified_base 11: mod_base = OTHER; note = 2'-O-methylguanosine
  modified_base 12: mod_base = OTHER; note = 2'-O-methylguanosine
  modified_base 13: mod_base = OTHER; note = 2'-O-methyladenosine
  modified_base 14: mod_base = OTHER; note = 2'-fluorouridine
  modified_base 15: mod_base = OTHER; note = 2'-O-methyluridine
  modified_base 16: mod_base = OTHER; note = 2'-fluoroadenosine
  modified_base 17: mod_base = OTHER; note = 2'-O-methylguanosine
  modified_base 18: mod_base = OTHER; note = 2'-O-methyladenosine
  modified_base 19: mod_base = OTHER; note = 2'-O-methyluridine
  modified_base 20: mod_base = OTHER; note = 2'-O-methylguanosine
  modified_base 21: mod_base = OTHER; note = 2'-O-methyluridine with phosphorothioate linkage
  modified_base 22: mod_base = OTHER; note = 2'-O-methyladenosine with phosphorothioate linkage
  modified_base 23: mod_base = OTHER; note = 2'-O-methylguanosine
tattggtaggggattagatgtag

SEQ ID NO: 1068 - RNA, 23 nt, synthetic construct
  source 1..23: mol_type = other RNA
  modified_base 1: mod_base = OTHER; note = 5'-vinyl-phosphonate-2'-O-methyluridine with phosphorothioate linkage
  modified_base 2: mod_base = OTHER; note = 2'-fluoroguanosine with phosphorothioate linkage
  modified_base 3: mod_base = OTHER; note = 2'-O-methylcytidine
  modified_base 4: mod_base = OTHER; note = 2'-O-methyladenosine
  modified_base 5: mod_base = OTHER; note = 2'-O-methyluridine
  modified_base 6: mod_base = OTHER; note = 2'-fluorouridine
  modified_base 7: mod_base = OTHER; note = 2'-O-methylguanosine
  modified_base 8: mod_base = OTHER; note = 2'-fluoroguanosine
  modified_base 9: mod_base = OTHER; note = 2'-fluorouridine
  modified_base 10: mod_base = OTHER; note = 2'-O-methyladenosine
  modified_base 11: mod_base = OTHER; note = 2'-O-methylguanosine
  modified_base 12: mod_base = OTHER; note = 2'-O-methylguanosine
  modified_base 13: mod_base = OTHER; note = 2'-O-methylguanosine
  modified_base 14: mod_base = OTHER; note = 2'-fluoroguanosine
  modified_base 15: mod_base = OTHER; note = 2'-O-methyladenosine
  modified_base 16: mod_base = OTHER; note = 2'-fluorouridine
  modified_base 17: mod_base = OTHER; note = 2'-O-methyluridine
  modified_base 18: mod_base = OTHER; note = 2'-O-methyladenosine
  modified_base 19: mod_base = OTHER; note = 2'-O-methylguanosine
  modified_base 20: mod_base = OTHER; note = 2'-O-methyladenosine
  modified_base 21: mod_base = OTHER; note = 2'-O-methyluridine with phosphorothioate linkage
  modified_base 22: mod_base = OTHER; note = 2'-O-methylguanosine with phosphorothioate linkage
  modified_base 23: mod_base = OTHER; note = 2'-O-methyluridine
tgcattggtaggggattagatgt

SEQ ID NO: 1069 - RNA, 23 nt, synthetic construct
  source 1..23: mol_type = other RNA
  modified_base 1: mod_base = OTHER; note = 5'-vinyl-phosphonate-2'-O-methyluridine with phosphorothioate linkage
  modified_base 2: mod_base = OTHER; note = 2'-fluoroadenosine with phosphorothioate linkage
  modified_base 3: mod_base = OTHER; note = 2'-O-methylcytidine
  modified_base 4: mod_base = OTHER; note = 2'-O-methyladenosine
  modified_base 5: mod_base = OTHER; note = 2'-O-methylguanosine
  modified_base 6: mod_base = OTHER; note = 2'-fluoroguanosine
  modified_base 7: mod_base = OTHER; note = 2'-O-methyladenosine
  modified_base 8: mod_base = OTHER; note = 2'-fluoroguanosine
  modified_base 9: mod_base = OTHER; note = 2'-fluoroguanosine
  modified_base 10: mod_base = OTHER; note = 2'-O-methylcytidine
  modified_base 11: mod_base = OTHER; note = 2'-O-methyladenosine
  modified_base 12: mod_base = OTHER; note = 2'-O-methyluridine
  modified_base 13: mod_base = OTHER; note = 2'-O-methyluridine
  modified_base 14: mod_base = OTHER; note = 2'-fluoroguanosine
  modified_base 15: mod_base = OTHER; note = 2'-O-methylguanosine
  modified_base 16: mod_base = OTHER; note = 2'-fluorouridine
  modified_base 17: mod_base = OTHER; note = 2'-O-methyladenosine
  modified_base 18: mod_base = OTHER; note = 2'-O-methylguanosine
  modified_base 19: mod_base = OTHER; note = 2'-O-methylguanosine
  modified_base 20: mod_base = OTHER; note = 2'-O-methylguanosine
  modified_base 21: mod_base = OTHER; note = 2'-O-methylguanosine with phosphorothioate linkage
  modified_base 22: mod_base = OTHER; note = 2'-O-methyladenosine with phosphorothioate linkage
  modified_base 23: mod_base = OTHER; note = 2'-O-methyluridine
tacaggaggcattggtaggggat

SEQ ID NO: 1070 - RNA, 23 nt, synthetic construct
  source 1..23: mol_type = other RNA
  modified_base 1: mod_base = OTHER; note = 5'-vinyl-phosphonate-2'-O-methyluridine with phosphorothioate linkage
  modified_base 2: mod_base = OTHER; note = 2'-fluoroguanosine with phosphorothioate linkage
  modified_base 3: mod_base = OTHER; note = 2'-O-methyladenosine
  modified_base 4: mod_base = OTHER; note = 2'-O-methylcytidine
  modified_base 5: mod_base = OTHER; note = 2'-O-methyladenosine
  modified_base 6: mod_base = OTHER; note = 2'-fluoroguanosine
  modified_base 7: mod_base = OTHER; note = 2'-O-methylguanosine
  modified_base 8: mod_base = OTHER; note = 2'-fluoroadenosine
  modified_base 9: mod_base = OTHER; note = 2'-fluoroguanosine
  modified_base 10: mod_base = OTHER; note = 2'-O-methylguanosine
  modified_base 11: mod_base = OTHER; note = 2'-O-methylcytidine
  modified_base 12: mod_base = OTHER; note = 2'-O-methyladenosine
  modified_base 13: mod_base = OTHER; note = 2'-O-methyluridine
  modified_base 14: mod_base = OTHER; note = 2'-fluorouridine
  modified_base 15: mod_base = OTHER; note = 2'-O-methylguanosine
  modified_base 16: mod_base = OTHER; note = 2'-fluoroguanosine
  modified_base 17: mod_base = OTHER; note = 2'-O-methyluridine
  modified_base 18: mod_base = OTHER; note = 2'-O-methyladenosine
  modified_base 19: mod_base = OTHER; note = 2'-O-methylguanosine
  modified_base 20: mod_base = OTHER; note = 2'-O-methylguanosine
  modified_base 21: mod_base = OTHER; note = 2'-O-methylguanosine with phosphorothioate linkage
  modified_base 22: mod_base = OTHER; note = 2'-O-methylguanosine with phosphorothioate linkage
  modified_base 23: mod_base = OTHER; note = 2'-O-methyladenosine
tgacaggaggcattggtagggga

SEQ ID NO: 1071 - RNA, 23 nt, synthetic construct
  source 1..23: mol_type = other RNA
  modified_base 1: mod_base = OTHER; note = 5'-vinyl-phosphonate-2'-O-methyluridine with phosphorothioate linkage
  modified_base 2: mod_base = OTHER; note = 2'-fluorouridine with phosphorothioate linkage
  modified_base 3: mod_base = OTHER; note = 2'-O-methyladenosine
  modified_base 4: mod_base = OTHER; note = 2'-O-methylguanosine
  modified_base 5: mod_base = OTHER; note = 2'-O-methylguanosine
  modified_base 6: mod_base = OTHER; note = 2'-fluoroguanosine
  modified_base 7: mod_base = OTHER; note = 2'-O-methyladenosine
  modified_base 8: mod_base = OTHER; note = 2'-fluorocytidine
  modified_base 9: mod_base = OTHER; note = 2'-fluoroadenosine
  modified_base 10: mod_base = OTHER; note = 2'-O-methylguanosine
  modified_base 11: mod_base = OTHER; note = 2'-O-methylguanosine
  modified_base 12: mod_base = OTHER; note = 2'-O-methyladenosine
  modified_base 13: mod_base = OTHER; note = 2'-O-methylguanosine
  modified_base 14: mod_base = OTHER; note = 2'-fluoroguanosine
  modified_base 15: mod_base = OTHER; note = 2'-O-methylcytidine
  modified_base 16: mod_base = OTHER; note = 2'-fluoroadenosine
  modified_base 17: mod_base = OTHER; note = 2'-O-methyluridine
  modified_base 18: mod_base = OTHER; note = 2'-O-methyluridine
  modified_base 19: mod_base = OTHER; note = 2'-O-methylguanosine
  modified_base 20: mod_base = OTHER; note = 2'-O-methylguanosine
  modified_base 21: mod_base = OTHER; note = 2'-O-methyluridine with phosphorothioate linkage
  modified_base 22: mod_base = OTHER; note = 2'-O-methyladenosine with phosphorothioate linkage
  modified_base 23: mod_base = OTHER; note = 2'-O-methylguanosine
ttagggacaggaggcattggtag

SEQ ID NO: 1072 - RNA, 23 nt, synthetic construct
  source 1..23: mol_type = other RNA
  modified_base 1: mod_base = OTHER; note = 5'-vinyl-phosphonate-2'-O-methyluridine with phosphorothioate linkage
  modified_base 2: mod_base = OTHER; note = 2'-fluorouridine with phosphorothioate linkage
  modified_base 3: mod_base = OTHER; note = 2'-O-methyluridine
  modified_base 4: mod_base = OTHER; note = 2'-O-methyladenosine
  modified_base 5: mod_base = OTHER; note = 2'-O-methylguanosine
  modified_base 6: mod_base = OTHER; note = 2'-fluoroguanosine
  modified_base 7: mod_base = OTHER; note = 2'-O-methylguanosine
  modified_base 8: mod_base = OTHER; note = 2'-fluoroadenosine
  modified_base 9: mod_base = OTHER; note = 2'-fluorocytidine
  modified_base 10: mod_base = OTHER; note = 2'-O-methyladenosine
  modified_base 11: mod_base = OTHER; note = 2'-O-methylguanosine
  modified_base 12: mod_base = OTHER; note = 2'-O-methylguanosine
  modified_base 13: mod_base = OTHER; note = 2'-O-methyladenosine
  modified_base 14: mod_base = OTHER; note = 2'-fluoroguanosine
  modified_base 15: mod_base = OTHER; note = 2'-O-methylguanosine
  modified_base 16: mod_base = OTHER; note = 2'-fluorocytidine
  modified_base 17: mod_base = OTHER; note = 2'-O-methyladenosine
  modified_base 18: mod_base = OTHER; note = 2'-O-methyluridine
  modified_base 19: mod_base = OTHER; note = 2'-O-methyluridine
  modified_base 20: mod_base = OTHER; note = 2'-O-methylguanosine
  modified_base 21: mod_base = OTHER; note = 2'-O-methylguanosine with phosphorothioate linkage
  modified_base 22: mod_base = OTHER; note = 2'-O-methyluridine with phosphorothioate linkage
  modified_base 23: mod_base = OTHER; note = 2'-O-methyladenosine
tttagggacaggaggcattggta

SEQ ID NO: 1073 - RNA, 23 nt, synthetic construct
  source 1..23: mol_type = other RNA
  modified_base 1: mod_base = OTHER; note = 5'-vinyl-phosphonate-2'-O-methyluridine with phosphorothioate linkage
  modified_base 2: mod_base = OTHER; note = 2'-fluoroadenosine with phosphorothioate linkage
  modified_base 3: mod_base = OTHER; note = 2'-O-methylguanosine
  modified_base 4: mod_base = OTHER; note = 2'-O-methyluridine
  modified_base 5: mod_base = OTHER; note = 2'-O-methyluridine
  modified_base 6: mod_base = OTHER; note = 2'-fluorouridine
  modified_base 7: mod_base = OTHER; note = 2'-O-methyladenosine
  modified_base 8: mod_base = OTHER; note = 2'-fluoroguanosine
  modified_base 9: mod_base = OTHER; note = 2'-fluoroguanosine
  modified_base 10: mod_base = OTHER; note = 2'-O-methylguanosine
  modified_base 11: mod_base = OTHER; note = 2'-O-methyladenosine
  modified_base 12: mod_base = OTHER; note = 2'-O-methylcytidine
  modified_base 13: mod_base = OTHER; note = 2'-O-methyladenosine
  modified_base 14: mod_base = OTHER; note = 2'-fluoroguanosine
  modified_base 15: mod_base = OTHER; note = 2'-O-methylguanosine
  modified_base 16: mod_base = OTHER; note = 2'-fluoroadenosine
  modified_base 17: mod_base = OTHER; note = 2'-O-methylguanosine
  modified_base 18: mod_base = OTHER; note = 2'-O-methylguanosine
  modified_base 19: mod_base = OTHER; note = 2'-O-methylcytidine
  modified_base 20: mod_base = OTHER; note = 2'-O-methyladenosine
  modified_base 21: mod_base = OTHER; note = 2'-O-methyluridine with phosphorothioate linkage
  modified_base 22: mod_base = OTHER; note = 2'-O-methyluridine with phosphorothioate linkage
  modified_base 23: mod_base = OTHER; note = 2'-O-methylguanosine
tagtttagggacaggaggcattg

SEQ ID NO: 1074 - RNA, 23 nt, synthetic construct
  source 1..23: mol_type = other RNA
  modified_base 1: mod_base = OTHER; note = 5'-vinyl-phosphonate-2'-O-methyluridine with phosphorothioate linkage
  modified_base 2: mod_base = OTHER; note = 2'-fluoroguanosine with phosphorothioate linkage
  modified_base 3: mod_base = OTHER; note = 2'-O-methyladenosine
  modified_base 4: mod_base = OTHER; note = 2'-O-methylguanosine
  modified_base 5: mod_base = OTHER; note = 2'-O-methyluridine
  modified_base 6: mod_base = OTHER; note = 2'-fluorouridine
  modified_base 7: mod_base = OTHER; note = 2'-O-methyluridine
  modified_base 8: mod_base = OTHER; note = 2'-fluoroadenosine
  modified_base 9: mod_base = OTHER; note = 2'-fluoroguanosine
  modified_base 10: mod_base = OTHER; note = 2'-O-methylguanosine
  modified_base 11: mod_base = OTHER; note = 2'-O-methylguanosine
  modified_base 12: mod_base = OTHER; note = 2'-O-methyladenosine
  modified_base 13: mod_base = OTHER; note = 2'-O-methylcytidine
  modified_base 14: mod_base = OTHER; note = 2'-fluoroadenosine
  modified_base 15: mod_base = OTHER; note = 2'-O-methylguanosine
  modified_base 16: mod_base = OTHER; note = 2'-fluoroguanosine
  modified_base 17: mod_base = OTHER; note = 2'-O-methyladenosine
  modified_base 18: mod_base = OTHER; note = 2'-O-methylguanosine
  modified_base 19: mod_base = OTHER; note = 2'-O-methylguanosine
  modified_base 20: mod_base = OTHER; note = 2'-O-methylcytidine
  modified_base 21: mod_base = OTHER; note = 2'-O-methyladenosine with phosphorothioate linkage
  modified_base 22: mod_base = OTHER; note = 2'-O-methyluridine with phosphorothioate linkage
  modified_base 23: mod_base = OTHER; note = 2'-O-methyluridine
tgagtttagggacaggaggcatt

SEQ ID NO: 1075 - RNA, 23 nt, synthetic construct
  source 1..23: mol_type = other RNA
  modified_base 1: mod_base = OTHER; note = 5'-vinyl-phosphonate-2'-O-methyluridine with phosphorothioate linkage
  modified_base 2: mod_base = OTHER; note = 2'-fluoroadenosine with phosphorothioate linkage
  modified_base 3: mod_base = OTHER; note = 2'-O-methylguanosine
  modified_base 4: mod_base = OTHER; note = 2'-O-methyladenosine
  modified_base 5: mod_base = OTHER; note = 2'-O-methylguanosine
  modified_base 6: mod_base = OTHER; note = 2'-fluoroadenosine
  modified_base 7: mod_base = OTHER; note = 2'-O-methylguanosine
  modified_base 8: mod_base = OTHER; note = 2'-fluoroguanosine
  modified_base 9: mod_base = OTHER; note = 2'-fluoroguanosine
  modified_base 10: mod_base = OTHER; note = 2'-O-methylcytidine
  modified_base 11: mod_base = OTHER; note = 2'-O-methyluridine
  modified_base 12: mod_base = OTHER; note = 2'-O-methylguanosine
  modified_base 13: mod_base = OTHER; note = 2'-O-methyluridine
  modified_base 14: mod_base = OTHER; note = 2'-fluorocytidine
  modified_base 15: mod_base = OTHER; note = 2'-O-methyladenosine
  modified_base 16: mod_base = OTHER; note = 2'-fluorouridine
  modified_base 17: mod_base = OTHER; note = 2'-O-methylcytidine
  modified_base 18: mod_base = OTHER; note = 2'-O-methyladenosine
  modified_base 19: mod_base = OTHER; note = 2'-O-methylguanosine
  modified_base 20: mod_base = OTHER; note = 2'-O-methyluridine
  modified_base 21: mod_base = OTHER; note = 2'-O-methyladenosine with phosphorothioate linkage
  modified_base 22: mod_base = OTHER; note = 2'-O-methyluridine with phosphorothioate linkage
  modified_base 23: mod_base = OTHER; note = 2'-O-methylguanosine
tagagagggctgtcatcagtatg

SEQ ID NO: 1076 - RNA, 23 nt, synthetic construct
  source 1..23: mol_type = other RNA
  modified_base 1: mod_base = OTHER; note = 5'-vinyl-phosphonate-2'-O-methyluridine with phosphorothioate linkage
  modified_base 2: mod_base = OTHER; note = 2'-fluoroguanosine with phosphorothioate linkage
  modified_base 3: mod_base = OTHER; note = 2'-O-methyladenosine
  modified_base 4: mod_base = OTHER; note = 2'-O-methyladenosine
  modified_base 5: mod_base = OTHER; note = 2'-O-methylcytidine
  modified_base 6: mod_base = OTHER; note = 2'-fluoroguanosine
  modified_base 7: mod_base = OTHER; note = 2'-O-methyladenosine
  modified_base 8: mod_base = OTHER; note = 2'-fluoroguanosine
  modified_base 9: mod_base = OTHER; note = 2'-fluoroadenosine
  modified_base 10: mod_base = OTHER; note = 2'-O-methylcytidine
  modified_base 11: mod_base = OTHER; note = 2'-O-methyladenosine
  modified_base 12: mod_base = OTHER; note = 2'-O-methylcytidine
  modified_base 13: mod_base = OTHER; note = 2'-O-methyluridine
  modified_base 14: mod_base = OTHER; note = 2'-fluoroguanosine
  modified_base 15: mod_base = OTHER; note = 2'-O-methylcytidine
  modified_base 16: mod_base = OTHER; note = 2'-fluorouridine
  modified_base 17: mod_base = OTHER; note = 2'-O-methylguanosine
  modified_base 18: mod_base = OTHER; note = 2'-O-methyladenosine
  modified_base 19: mod_base = OTHER; note = 2'-O-methylguanosine
  modified_base 20: mod_base = OTHER; note = 2'-O-methylcytidine
  modified_base 21: mod_base = OTHER; note = 2'-O-methyluridine with phosphorothioate linkage
  modified_base 22: mod_base = OTHER; note = 2'-O-methylguanosine with phosphorothioate linkage
  modified_base 23: mod_base = OTHER; note = 2'-O-methylguanosine
tgaacgagacactgctgagctgg

SEQ ID NO: 1077 - RNA, 23 nt, synthetic construct
  source 1..23: mol_type = other RNA
  modified_base 1: mod_base = OTHER; note = 5'-vinyl-phosphonate-2'-O-methyluridine with phosphorothioate linkage
  modified_base 2: mod_base = OTHER; note = 2'-fluoroguanosine with phosphorothioate linkage
  modified_base 3: mod_base = OTHER; note = 2'-O-methylguanosine
  modified_base 4: mod_base = OTHER; note = 2'-O-methyladenosine
  modified_base 5: mod_base = OTHER; note = 2'-O-methyladenosine
  modified_base 6: mod_base = OTHER; note = 2'-fluorocytidine
  modified_base 7: mod_base = OTHER; note = 2'-O-methylguanosine
  modified_base 8: mod_base = OTHER; note = 2'-fluoroadenosine
  modified_base 9: mod_base = OTHER; note = 2'-fluoroguanosine
  modified_base 10: mod_base = OTHER; note = 2'-O-methyladenosine
  modified_base 11: mod_base = OTHER; note = 2'-O-methylcytidine
  modified_base 12: mod_base = OTHER; note = 2'-O-methyladenosine
  modified_base 13: mod_base = OTHER; note = 2'-O-methylcytidine
  modified_base 14: mod_base = OTHER; note = 2'-fluorouridine
  modified_base 15: mod_base = OTHER; note = 2'-O-methylguanosine
  modified_base 16: mod_base = OTHER; note = 2'-fluorocytidine
  modified_base 17: mod_base = OTHER; note = 2'-O-methyluridine
  modified_base 18: mod_base = OTHER; note = 2'-O-methylguanosine
  modified_base 19: mod_base = OTHER; note = 2'-O-methyladenosine
  modified_base 20: mod_base = OTHER; note = 2'-O-methylguanosine
  modified_base 21: mod_base = OTHER; note = 2'-O-methylcytidine with phosphorothioate linkage
  modified_base 22: mod_base = OTHER; note = 2'-O-methyluridine with phosphorothioate linkage
  modified_base 23: mod_base = OTHER; note = 2'-O-methylguanosine
tggaacgagacactgctgagctg

SEQ ID NO: 1078 - RNA, 23 nt, synthetic construct
  source 1..23: mol_type = other RNA
  modified_base 1: mod_base = OTHER; note = 5'-vinyl-phosphonate-2'-O-methyluridine with phosphorothioate linkage
  modified_base 2: mod_base = OTHER; note = 2'-fluoroadenosine with phosphorothioate linkage
  modified_base 3: mod_base = OTHER; note = 2'-O-methyluridine
  modified_base 4: mod_base = OTHER; note = 2'-O-methylguanosine
  modified_base 5: mod_base = OTHER; note = 2'-O-methyluridine
  modified_base 6: mod_base = OTHER; note = 2'-fluorocytidine
  modified_base 7: mod_base = OTHER; note = 2'-O-methylguanosine
  modified_base 8: mod_base = OTHER; note = 2'-fluoroguanosine
  modified_base 9: mod_base = OTHER; note = 2'-fluorouridine
  modified_base 10: mod_base = OTHER; note = 2'-O-methylcytidine
  modified_base 11: mod_base = OTHER; note = 2'-O-methyluridine
  modified_base 12: mod_base = OTHER; note = 2'-O-methylguanosine
  modified_base 13: mod_base = OTHER; note = 2'-O-methylcytidine
  modified_base 14: mod_base = OTHER; note = 2'-fluorouridine
  modified_base 15: mod_base = OTHER; note = 2'-O-methyladenosine
  modified_base 16: mod_base = OTHER; note = 2'-fluorocytidine
  modified_base 17: mod_base = OTHER; note = 2'-O-methylcytidine
  modified_base 18: mod_base = OTHER; note = 2'-O-methylguanosine
  modified_base 19: mod_base = OTHER; note = 2'-O-methyluridine
  modified_base 20: mod_base = OTHER; note = 2'-O-methylcytidine
  modified_base 21: mod_base = OTHER; note = 2'-O-methylcytidine with phosphorothioate linkage
  modified_base 22: mod_base = OTHER; note = 2'-O-methylcytidine with phosphorothioate linkage
  modified_base 23: mod_base = OTHER; note = 2'-O-methylcytidine
tatgtcggtctgctaccgtcccc

SEQ ID NO: 1079 - RNA, 23 nt, synthetic construct
  source 1..23: mol_type = other RNA
  modified_base 1: mod_base = OTHER; note = 5'-vinyl-phosphonate-2'-O-methyluridine with phosphorothioate linkage
  modified_base 2: mod_base = OTHER; note = 2'-fluoroguanosine with phosphorothioate linkage
  modified_base 3: mod_base = OTHER; note = 2'-O-methylguanosine
  modified_base 4: mod_base = OTHER; note = 2'-O-methyladenosine
  modified_base 5: mod_base = OTHER; note = 2'-O-methyluridine
  modified_base 6: mod_base = OTHER; note = 2'-fluoroguanosine
  modified_base 7: mod_base = OTHER; note = 2'-O-methyluridine
  modified_base 8: mod_base = OTHER; note = 2'-fluorocytidine
  modified_base 9: mod_base = OTHER; note = 2'-fluoroguanosine
  modified_base 10: mod_base = OTHER; note = 2'-O-methylguanosine
  modified_base 11: mod_base = OTHER; note = 2'-O-methyluridine
  modified_base 12: mod_base = OTHER; note = 2'-O-methylcytidine
  modified_base 13: mod_base = OTHER; note = 2'-O-methyluridine
  modified_base 14: mod_base = OTHER; note = 2'-fluoroguanosine
  modified_base 15: mod_base = OTHER; note = 2'-O-methylcytidine
  modified_base 16: mod_base = OTHER; note = 2'-fluorouridine
  modified_base 17: mod_base = OTHER; note = 2'-O-methyladenosine
  modified_base 18: mod_base = OTHER; note = 2'-O-methylcytidine
  modified_base 19: mod_base = OTHER; note = 2'-O-methylcytidine
  modified_base 20: mod_base = OTHER; note = 2'-O-methylguanosine
  modified_base 21: mod_base = OTHER; note = 2'-O-methyluridine with phosphorothioate linkage
  modified_base 22: mod_base = OTHER; note = 2'-O-methylcytidine with phosphorothioate linkage
  modified_base 23: mod_base = OTHER; note = 2'-O-methylcytidine
tggatgtcggtctgctaccgtcc

SEQ ID NO: 1080 - RNA, 23 nt, synthetic construct
  source 1..23: mol_type = other RNA
  modified_base 1: mod_base = OTHER; note = 5'-vinyl-phosphonate-2'-O-methyluridine with phosphorothioate linkage
  modified_base 2: mod_base = OTHER; note = 2'-fluoroadenosine with phosphorothioate linkage
  modified_base 3: mod_base = OTHER; note = 2'-O-methylguanosine
  modified_base 4: mod_base = OTHER; note = 2'-O-methylguanosine
  modified_base 5: mod_base = OTHER; note = 2'-O-methyladenosine
  modified_base 6: mod_base = OTHER; note = 2'-fluorouridine
  modified_base 7: mod_base = OTHER; note = 2'-O-methylguanosine
  modified_base 8: mod_base = OTHER; note = 2'-fluorouridine
  modified_base 9: mod_base = OTHER; note = 2'-fluorocytidine
  modified_base 10: mod_base = OTHER; note = 2'-O-methylguanosine
  modified_base 11: mod_base = OTHER; note = 2'-O-methylguanosine
  modified_base 12: mod_base = OTHER; note = 2'-O-methyluridine
  modified_base 13: mod_base = OTHER; note = 2'-O-methylcytidine
  modified_base 14: mod_base = OTHER; note = 2'-fluorouridine
  modified_base 15: mod_base = OTHER; note = 2'-O-methylguanosine
  modified_base 16: mod_base = OTHER; note = 2'-fluorocytidine
  modified_base 17: mod_base = OTHER; note = 2'-O-methyluridine
  modified_base 18: mod_base = OTHER; note = 2'-O-methyladenosine
  modified_base 19: mod_base = OTHER; note = 2'-O-methylcytidine
  modified_base 20: mod_base = OTHER; note = 2'-O-methylcytidine
  modified_base 21: mod_base = OTHER; note = 2'-O-methylguanosine with phosphorothioate linkage
  modified_base 22: mod_base = OTHER; note = 2'-O-methyluridine with phosphorothioate linkage
  modified_base 23: mod_base = OTHER; note = 2'-O-methylcytidine
taggatgtcggtctgctaccgtc

SEQ ID NO: 1081 - RNA, 23 nt, synthetic construct
  source 1..23: mol_type = other RNA
  modified_base 1: mod_base = OTHER; note = 5'-vinyl-phosphonate-2'-O-methyluridine with phosphorothioate linkage
  modified_base 2: mod_base = OTHER; note = 2'-fluorocytidine with phosphorothioate linkage
  modified_base 3: mod_base = OTHER; note = 2'-O-methyladenosine
  modified_base 4: mod_base = OTHER; note = 2'-O-methylguanosine
  modified_base 5: mod_base = OTHER; note = 2'-O-methyladenosine
  modified_base 6: mod_base = OTHER; note = 2'-fluoroadenosine
  modified_base 7: mod_base = OTHER; note = 2'-O-methylguanosine
  modified_base 8: mod_base = OTHER; note = 2'-fluoroguanosine
  modified_base 9: mod_base = OTHER; note = 2'-fluoroadenosine
  modified_base 10: mod_base = OTHER; note = 2'-O-methyluridine
  modified_base 11: mod_base = OTHER; note = 2'-O-methylguanosine
  modified_base 12: mod_base = OTHER; note = 2'-O-methyluridine
  modified_base 13: mod_base = OTHER; note = 2'-O-methylcytidine
  modified_base 14: mod_base = OTHER; note = 2'-fluoroguanosine
  modified_base 15: mod_base = OTHER; note = 2'-O-methylguanosine
  modified_base 16: mod_base = OTHER; note = 2'-fluorouridine
  modified_base 17: mod_base = OTHER; note = 2'-O-methylcytidine
  modified_base 18: mod_base = OTHER; note = 2'-O-methyluridine
  modified_base 19: mod_base = OTHER; note = 2'-O-methylguanosine
  modified_base 20: mod_base = OTHER; note = 2'-O-methylcytidine
  modified_base 21: mod_base = OTHER; note = 2'-O-methyluridine with phosphorothioate linkage
  modified_base 22: mod_base = OTHER; note = 2'-O-methyladenosine with phosphorothioate linkage
  modified_base 23: mod_base = OTHER; note = 2'-O-methylcytidine
tcagaaggatgtcggtctgctac

SEQ ID NO: 1082 - RNA, 23 nt, synthetic construct
  source 1..23: mol_type = other RNA
  modified_base 1: mod_base = OTHER; note = 5'-vinyl-phosphonate-2'-O-methyluridine with phosphorothioate linkage
  modified_base 2: mod_base = OTHER; note = 2'-fluorocytidine with phosphorothioate linkage
  modified_base 3: mod_base = OTHER; note = 2'-O-methylcytidine
  modified_base 4: mod_base = OTHER; note = 2'-O-methyladenosine
  modified_base 5: mod_base = OTHER; note = 2'-O-methylguanosine
  modified_base 6: mod_base = OTHER; note = 2'-fluoroadenosine
  modified_base 7: mod_base = OTHER; note = 2'-O-methyladenosine
  modified_base 8: mod_base = OTHER; note = 2'-fluoroguanosine
  modified_base 9: mod_base = OTHER; note = 2'-fluoroguanosine
  modified_base 10: mod_base = OTHER; note = 2'-O-methyladenosine
  modified_base 11: mod_base = OTHER; note = 2'-O-methyluridine
  modified_base 12: mod_base = OTHER; note = 2'-O-methylguanosine
  modified_base 13: mod_base = OTHER; note = 2'-O-methyluridine
  modified_base 14: mod_base = OTHER; note = 2'-fluorocytidine
  modified_base 15: mod_base = OTHER; note = 2'-O-methylguanosine
  modified_base 16: mod_base = OTHER; note = 2'-fluoroguanosine
  modified_base 17: mod_base = OTHER; note = 2'-O-methyluridine
  modified_base 18: mod_base = OTHER; note = 2'-O-methylcytidine
  modified_base 19: mod_base = OTHER; note = 2'-O-methyluridine
  modified_base 20: mod_base = OTHER; note = 2'-O-methylguanosine
  modified_base 21: mod_base = OTHER; note = 2'-O-methylcytidine with phosphorothioate linkage
  modified_base 22: mod_base = OTHER; note = 2'-O-methyluridine with phosphorothioate linkage
  modified_base 23: mod_base = OTHER; note = 2'-O-methyladenosine
tccagaaggatgtcggtctgcta

SEQ ID NO: 1083 - RNA, 23 nt, synthetic construct
  source 1..23: mol_type = other RNA
  modified_base 1: mod_base = OTHER; note = 5'-vinyl-phosphonate-2'-O-methyluridine with phosphorothioate linkage
  modified_base 2: mod_base = OTHER; note = 2'-fluoroguanosine with phosphorothioate linkage
  modified_base 3: mod_base = OTHER; note = 2'-O-methyluridine
  modified_base 4: mod_base = OTHER; note = 2'-O-methylguanosine
  modified_base 5: mod_base = OTHER; note = 2'-O-methyladenosine
  modified_base 6: mod_base = OTHER; note = 2'-fluorouridine
  modified_base 7: mod_base = OTHER; note = 2'-O-methylguanosine
  modified_base 8: mod_base = OTHER; note = 2'-fluoroguanosine
  modified_base 9: mod_base = OTHER; note = 2'-fluoroadenosine
  modified_base 10: mod_base = OTHER; note = 2'-O-methylcytidine
  modified_base 11: mod_base = OTHER; note = 2'-O-methyladenosine
  modified_base 12: mod_base = OTHER; note = 2'-O-methylguanosine
  modified_base 13: mod_base = OTHER; note = 2'-O-methyluridine
  modified_base 14: mod_base = OTHER; note = 2'-fluorouridine
  modified_base 15: mod_base = OTHER; note = 2'-O-methylguanosine
  modified_base 16: mod_base = OTHER; note = 2'-fluorocytidine
  modified_base 17: mod_base = OTHER; note = 2'-O-methyladenosine
  modified_base 18: mod_base = OTHER; note = 2'-O-methyluridine
  modified_base 19: mod_base = OTHER; note = 2'-O-methylguanosine
  modified_base 20: mod_base = OTHER; note = 2'-O-methylguanosine
  modified_base 21: mod_base = OTHER; note = 2'-O-methyladenosine with phosphorothioate linkage
  modified_base 22: mod_base = OTHER; note = 2'-O-methyladenosine with phosphorothioate linkage
  modified_base 23: mod_base = OTHER; note = 2'-O-methylguanosine
tgtgatggacagttgcatggaag

SEQ ID NO: 1084 - RNA, 23 nt, synthetic construct
  source 1..23: mol_type = other RNA
  modified_base 1: mod_base = OTHER; note = 5'-vinyl-phosphonate-2'-O-methyluridine with phosphorothioate linkage
  modified_base 2: mod_base = OTHER; note = 2'-fluorocytidine with phosphorothioate linkage
  modified_base 3: mod_base = OTHER; note = 2'-O-methylguanosine
  modified_base 4: mod_base = OTHER; note = 2'-O-methyluridine
  modified_base 5: mod_base = OTHER; note = 2'-O-methylguanosine
  modified_base 6: mod_base = OTHER; note = 2'-fluoroadenosine
  modified_base 7: mod_base = OTHER; note = 2'-O-methyluridine
  modified_base 8: mod_base = OTHER; note = 2'-fluoroguanosine
  modified_base 9: mod_base = OTHER; note = 2'-fluoroguanosine
  modified_base 10: mod_base = OTHER; note = 2'-O-methyladenosine
  modified_base 11: mod_base = OTHER; note = 2'-O-methylcytidine
  modified_base 12: mod_base = OTHER; note = 2'-O-methyladenosine
  modified_base 13: mod_base = OTHER; note = 2'-O-methylguanosine
  modified_base 14: mod_base = OTHER; note = 2'-fluorouridine
  modified_base 15: mod_base = OTHER; note = 2'-O-methyluridine
  modified_base 16: mod_base = OTHER; note = 2'-fluoroguanosine
  modified_base 17: mod_base = OTHER; note = 2'-O-methylcytidine
  modified_base 18: mod_base = OTHER; note = 2'-O-methyladenosine
  modified_base 19: mod_base = OTHER; note = 2'-O-methyluridine
  modified_base 20: mod_base = OTHER; note = 2'-O-methylguanosine
  modified_base 21: mod_base = OTHER; note = 2'-O-methylguanosine with phosphorothioate linkage
  modified_base 22: mod_base = OTHER; note = 2'-O-methyladenosine with phosphorothioate linkage
  modified_base 23: mod_base = OTHER; note = 2'-O-methyladenosine
tcgtgatggacagttgcatggaa

SEQ ID NO: 1085 - RNA, 23 nt, synthetic construct
  source 1..23: mol_type = other RNA
  modified_base 1: mod_base = OTHER; note = 5'-vinyl-phosphonate-2'-O-methyluridine with phosphorothioate linkage
  modified_base 2: mod_base = OTHER; note = 2'-fluorocytidine with phosphorothioate linkage
  modified_base 3: mod_base = OTHER; note = 2'-O-methylcytidine
  modified_base 4: mod_base = OTHER; note = 2'-O-methylguanosine
  modified_base 5: mod_base = OTHER; note = 2'-O-methyluridine
  modified_base 6: mod_base = OTHER; note = 2'-fluoroguanosine
  modified_base 7: mod_base = OTHER; note = 2'-O-methyladenosine
  modified_base 8: mod_base = OTHER; note = 2'-fluorouridine
  modified_base 9: mod_base = OTHER; note = 2'-fluoroguanosine
  modified_base 10: mod_base = OTHER; note = 2'-O-methylguanosine
  modified_base 11: mod_base = OTHER; note = 2'-O-methyladenosine
  modified_base 12: mod_base = OTHER; note = 2'-O-methylcytidine
  modified_base 13: mod_base = OTHER; note = 2'-O-methyladenosine
  modified_base 14: mod_base = OTHER; note = 2'-fluoroguanosine
  modified_base 15: mod_base = OTHER; note = 2'-O-methyluridine
  modified_base 16: mod_base = OTHER; note = 2'-fluorouridine
  modified_base 17: mod_base = OTHER; note = 2'-O-methylguanosine
  modified_base 18: mod_base = OTHER; note = 2'-O-methylcytidine
  modified_base 19: mod_base = OTHER; note = 2'-O-methyladenosine
  modified_base 20: mod_base = OTHER; note = 2'-O-methyluridine
  modified_base 21: mod_base = OTHER; note = 2'-O-methylguanosine with phosphorothioate linkage
  modified_base 22: mod_base = OTHER; note = 2'-O-methylguanosine with phosphorothioate linkage
  modified_base 23: mod_base = OTHER; note = 2'-O-methyladenosine
tccgtgatggacagttgcatgga

SEQ ID NO: 1086 - RNA, 23 nt, synthetic construct
  source 1..23: mol_type = other RNA
  modified_base 1: mod_base = OTHER; note = 5'-vinyl-phosphonate-2'-O-methyluridine with phosphorothioate linkage
  modified_base 2: mod_base = OTHER; note = 2'-fluorouridine with phosphorothioate linkage
  modified_base 3: mod_base = OTHER; note = 2'-O-methylguanosine
  modified_base 4: mod_base = OTHER; note = 2'-O-methylcytidine
  modified_base 5: mod_base = OTHER; note = 2'-O-methyladenosine
  modified_base 6: mod_base = OTHER; note = 2'-fluoroguanosine
  modified_base 7: mod_base = OTHER; note = 2'-O-methylcytidine
  modified_base 8: mod_base = OTHER; note = 2'-fluorocytidine
  modified_base 9: mod_base = OTHER; note = 2'-fluoroguanosine
  modified_base 10: mod_base = OTHER; note = 2'-O-methyluridine
  modified_base 11: mod_base = OTHER; note = 2'-O-methylguanosine
  modified_base 12: mod_base = OTHER; note = 2'-O-methyladenosine
  modified_base 13: mod_base = OTHER; note = 2'-O-methyluridine
  modified_base 14: mod_base = OTHER; note = 2'-fluoroguanosine
  modified_base 15: mod_base = OTHER; note = 2'-O-methylguanosine
  modified_base 16: mod_base = OTHER; note = 2'-fluoroadenosine
  modified_base 17: mod_base = OTHER; note = 2'-O-methylcytidine
  modified_base 18: mod_base = OTHER; note = 2'-O-methyladenosine
  modified_base 19: mod_base = OTHER; note = 2'-O-methylguanosine
  modified_base 20: mod_base = OTHER; note = 2'-O-methyluridine
  modified_base 21: mod_base = OTHER; note = 2'-O-methyluridine with phosphorothioate linkage
  modified_base 22: mod_base = OTHER; note = 2'-O-methylguanosine with phosphorothioate linkage
  modified_base 23: mod_base = OTHER; note = 2'-O-methylcytidine
ttgcagccgtgatggacagttgc

SEQ ID NO: 1087 - RNA, 23 nt, synthetic construct
  source 1..23: mol_type = other RNA
  modified_base 1: mod_base = OTHER; note = 5'-vinyl-phosphonate-2'-O-methyluridine with phosphorothioate linkage
  modified_base 2: mod_base = OTHER; note = 2'-fluorouridine with phosphorothioate linkage
  modified_base 3: mod_base = OTHER; note = 2'-O-methyluridine
  modified_base 4: mod_base = OTHER; note = 2'-O-methylguanosine
  modified_base 5: mod_base = OTHER; note = 2'-O-methylcytidine
  modified_base 6: mod_base = OTHER; note = 2'-fluoroadenosine
  modified_base 7: mod_base = OTHER; note = 2'-O-methylguanosine
  modified_base 8: mod_base = OTHER; note = 2'-fluorocytidine
  modified_base 9: mod_base = OTHER; note = 2'-fluorocytidine
  modified_base 10: mod_base = OTHER; note = 2'-O-methylguanosine
  modified_base 11: mod_base = OTHER; note = 2'-O-methyluridine
  modified_base 12: mod_base = OTHER; note = 2'-O-methylguanosine
  modified_base 13: mod_base = OTHER; note = 2'-O-methyladenosine
  modified_base 14: mod_base = OTHER; note = 2'-fluorouridine
  modified_base 15: mod_base = OTHER; note = 2'-O-methylguanosine
  modified_base 16: mod_base = OTHER; note = 2'-fluoroguanosine
  modified_base 17: mod_base = OTHER; note = 2'-O-methyladenosine
  modified_base 18: mod_base = OTHER; note = 2'-O-methylcytidine
  modified_base 19: mod_base = OTHER; note = 2'-O-methyladenosine
  modified_base 20: mod_base = OTHER; note = 2'-O-methylguanosine
  modified_base 21: mod_base = OTHER; note = 2'-O-methyluridine with phosphorothioate linkage
  modified_base 22: mod_base = OTHER; note = 2'-O-methyluridine with phosphorothioate linkage
  modified_base 23: mod_base = OTHER; note = 2'-O-methylguanosine
tttgcagccgtgatggacagttg

SEQ ID NO: 1088 - RNA, 23 nt, synthetic construct
  source 1..23: mol_type = other RNA
  modified_base 1: mod_base = OTHER; note = 5'-vinyl-phosphonate-2'-O-methyluridine with phosphorothioate linkage
  modified_base 2: mod_base = OTHER; note = 2'-fluorocytidine with phosphorothioate linkage
  modified_base 3: mod_base = OTHER; note = 2'-O-methyladenosine
  modified_base 4: mod_base = OTHER; note = 2'-O-methylguanosine
  modified_base 5: mod_base = OTHER; note = 2'-O-methyluridine
  modified_base 6: mod_base = OTHER; note = 2'-fluorouridine
  modified_base 7: mod_base = OTHER; note = 2'-O-methylguanosine
  modified_base 8: mod_base = OTHER; note = 2'-fluorocytidine
  modified_base 9: mod_base = OTHER; note = 2'-fluoroadenosine
  modified_base 10: mod_base = OTHER; note = 2'-O-methylguanosine
  modified_base 11: mod_base = OTHER; note = 2'-O-methylcytidine
  modified_base 12: mod_base = OTHER; note = 2'-O-methylcytidine
  modified_base 13: mod_base = OTHER; note = 2'-O-methylguanosine
  modified_base 14: mod_base = OTHER; note = 2'-fluorouridine
  modified_base 15: mod_base = OTHER; note = 2'-O-methylguanosine
  modified_base 16: mod_base = OTHER; note = 2'-fluoroadenosine
  modified_base 17: mod_base = OTHER; note = 2'-O-methyluridine
  modified_base 18: mod_base = OTHER; note = 2'-O-methylguanosine
  modified_base 19: mod_base = OTHER; note = 2'-O-methylguanosine
  modified_base 20: mod_base = OTHER; note = 2'-O-methyladenosine
  modified_base 21: mod_base = OTHER; note = 2'-O-methylcytidine with phosphorothioate linkage
  modified_base 22: mod_base = OTHER; note = 2'-O-methyladenosine with phosphorothioate linkage
  modified_base 23: mod_base = OTHER; note = 2'-O-methylguanosine
tcagttgcagccgtgatggacag

SEQ ID NO: 1089 - RNA, 23 nt, synthetic construct
  source 1..23: mol_type = other RNA
  modified_base 1: mod_base = OTHER; note = 5'-vinyl-phosphonate-2'-O-methyluridine with phosphorothioate linkage
  modified_base 2: mod_base = OTHER; note = 2'-fluoroadenosine with phosphorothioate linkage
  modified_base 3: mod_base = OTHER; note = 2'-O-methyluridine
  modified_base 4: mod_base = OTHER; note = 2'-O-methyluridine
  modified_base 5: mod_base = OTHER; note = 2'-O-methyluridine
  modified_base 6: mod_base = OTHER; note = 2'-fluorocytidine
  modified_base 7: mod_base = OTHER; note = 2'-O-methyladenosine
  modified_base 8: mod_base = OTHER; note = 2'-fluoroguanosine
  modified_base 9: mod_base = OTHER; note = 2'-fluorouridine
  modified_base 10: mod_base = OTHER; note = 2'-O-methyluridine
  modified_base 11: mod_base = OTHER; note = 2'-O-methylguanosine
  modified_base 12: mod_base = OTHER; note = 2'-O-methylcytidine
  modified_base 13: mod_base = OTHER; note = 2'-O-methyladenosine
  modified_base 14: mod_base = OTHER; note = 2'-fluoroguanosine
  modified_base 15: mod_base = OTHER; note = 2'-O-methylcytidine
  modified_base 16: mod_base = OTHER; note = 2'-fluorocytidine
  modified_base 17: mod_base = OTHER; note = 2'-O-methylguanosine
  modified_base 18: mod_base = OTHER; note = 2'-O-methyluridine
  modified_base 19: mod_base = OTHER; note = 2'-O-methylguanosine
  modified_base 20: mod_base = OTHER; note = 2'-O-methyladenosine
  modified_base 21: mod_base = OTHER; note = 2'-O-methyluridine with phosphorothioate linkage
  modified_base 22: mod_base = OTHER; note = 2'-O-methylguanosine with phosphorothioate linkage
  modified_base 23: mod_base = OTHER; note = 2'-O-methylguanosine
tatttcagttgcagccgtgatgg

SEQ ID NO: 1090 - RNA, 23 nt, synthetic construct
  source 1..23: mol_type = other RNA
  modified_base 1: mod_base = OTHER; note = 5'-vinyl-phosphonate-2'-O-methyluridine with phosphorothioate linkage
  modified_base 2: mod_base = OTHER; note = 2'-fluorouridine with phosphorothioate linkage
  modified_base 3: mod_base = OTHER; note = 2'-O-methyluridine
  modified_base 4: mod_base = OTHER; note = 2'-O-methylcytidine
  modified_base 5: mod_base = OTHER; note = 2'-O-methyluridine
  modified_base 6: mod_base = OTHER; note = 2'-fluoroguanosine
  modified_base 7: mod_base = OTHER; note = 2'-O-methylguanosine
  modified_base 8: mod_base = OTHER; note = 2'-fluorouridine
  modified_base 9: mod_base = OTHER; note = 2'-fluoroguanosine
  modified_base 10: mod_base = OTHER; note = 2'-O-methylcytidine
  modified_base 11: mod_base = OTHER; note = 2'-O-methylguanosine
  modified_base 12: mod_base = OTHER; note = 2'-O-methylcytidine
  modified_base 13: mod_base = OTHER; note = 2'-O-methyluridine
  modified_base 14: mod_base = OTHER; note = 2'-fluoroguanosine
  modified_base 15: mod_base = OTHER; note = 2'-O-methyluridine
  modified_base 16: mod_base = OTHER; note = 2'-fluoroguanosine
  modified_base 17: mod_base = OTHER; note = 2'-O-methyluridine
  modified_base 18: mod_base = OTHER; note = 2'-O-methylcytidine
  modified_base 19: mod_base = OTHER; note = 2'-O-methylcytidine
  modified_base 20: mod_base = OTHER; note = 2'-O-methylcytidine
  modified_base 21: mod_base = OTHER; note = 2'-O-methyladenosine with phosphorothioate linkage
  modified_base 22: mod_base = OTHER; note = 2'-O-methylguanosine with phosphorothioate linkage
  modified_base 23: mod_base = OTHER; note = 2'-O-methylcytidine
tttctggtgcgctgtgtcccagc

SEQ ID NO: 1091 - RNA, 23 nt, synthetic construct
  source 1..23: mol_type = other RNA
  modified_base 1: mod_base = OTHER; note = 5'-vinyl-phosphonate-2'-O-methyluridine with phosphorothioate linkage
  modified_base 2: mod_base = OTHER; note = 2'-fluoroadenosine with phosphorothioate linkage
  modified_base 3: mod_base = OTHER; note = 2'-O-methylguanosine
  modified_base 4: mod_base = OTHER; note = 2'-O-methylcytidine
  modified_base 5: mod_base = OTHER; note = 2'-O-methyluridine
  modified_base 6: mod_base = OTHER; note = 2'-fluorouridine
  modified_base 7: mod_base = OTHER; note = 2'-O-methylcytidine
  modified_base 8: mod_base = OTHER; note = 2'-fluorouridine
  modified_base 9: mod_base = OTHER; note = 2'-fluoroguanosine
  modified_base 10: mod_base = OTHER; note = 2'-O-methylguanosine
  modified_base 11: mod_base = OTHER; note = 2'-O-methyluridine
  modified_base 12: mod_base = OTHER; note = 2'-O-methylguanosine
  modified_base 13: mod_base = OTHER; note = 2'-O-methylcytidine
  modified_base 14: mod_base = OTHER; note = 2'-fluoroguanosine
  modified_base 15: mod_base = OTHER; note = 2'-O-methylcytidine
  modified_base 16: mod_base = OTHER; note = 2'-fluorouridine
  modified_base 17: mod_base = OTHER; note = 2'-O-methylguanosine
  modified_base 18: mod_base = OTHER; note = 2'-O-methyluridine
  modified_base 19: mod_base = OTHER; note = 2'-O-methylguanosine
  modified_base 20: mod_base = OTHER; note = 2'-O-methyluridine
  modified_base 21: mod_base = OTHER; note = 2'-O-methylcytidine with phosphorothioate linkage
  modified_base 22: mod_base = OTHER; note = 2'-O-methylcytidine with phosphorothioate linkage
  modified_base 23: mod_base = OTHER; note = 2'-O-methylcytidine
tagcttctggtgcgctgtgtccc

SEQ ID NO: 1092 - RNA, 23 nt, synthetic construct
  source 1..23: mol_type = other RNA
  modified_base 1: mod_base = OTHER; note = 5'-vinyl-phosphonate-2'-O-methyluridine with phosphorothioate linkage
  modified_base 2: mod_base = OTHER; note = 2'-fluorouridine with phosphorothioate linkage
  modified_base 3: mod_base = OTHER; note = 2'-O-methyluridine
  modified_base 4: mod_base = OTHER; note = 2'-O-methyluridine
  modified_base 5: mod_base = OTHER; note = 2'-O-methyladenosine
  modified_base 6: mod_base = OTHER; note = 2'-fluoroguanosine
  modified_base 7: mod_base = OTHER; note = 2'-O-methylcytidine
  modified_base 8: mod_base = OTHER; note = 2'-fluorouridine
  modified_base 9: mod_base = OTHER; note = 2'-fluorouridine
  modified_base 10: mod_base = OTHER; note = 2'-O-methylcytidine
  modified_base 11: mod_base = OTHER; note = 2'-O-methyluridine
  modified_base 12: mod_base = OTHER; note = 2'-O-methylguanosine
  modified_base 13: mod_base = OTHER; note = 2'-O-methylguanosine
  modified_base 14: mod_base = OTHER; note = 2'-fluorouridine
  modified_base 15: mod_base = OTHER; note = 2'-O-methylguanosine
  modified_base 16: mod_base = OTHER; note = 2'-fluorocytidine
  modified_base 17: mod_base = OTHER; note = 2'-O-methylguanosine
  modified_base 18: mod_base = OTHER; note = 2'-O-methylcytidine
  modified_base 19: mod_base = OTHER; note = 2'-O-methyluridine
  modified_base 20: mod_base = OTHER; note = 2'-O-methylguanosine
  modified_base 21: mod_base = OTHER; note = 2'-O-methyluridine with phosphorothioate linkage
  modified_base 22: mod_base = OTHER; note = 2'-O-methylguanosine with phosphorothioate linkage
  modified_base 23: mod_base = OTHER; note = 2'-O-methyluridine
ttttagcttctggtgcgctgtgt

SEQ ID NO: 1093 - RNA, 21 nt, synthetic construct
  source 1..21: mol_type = other RNA
  modified_base 1: mod_base = OTHER; note = 5'-vinyl-phosphonate-2'-O-methyluridine with phosphorothioate linkage
  modified_base 2: mod_base = OTHER; note = 2'-fluoroguanosine with phosphorothioate linkage
  modified_base 3: mod_base = OTHER; note = 2'-O-methyladenosine
  modified_base 4: mod_base = OTHER; note = 2'-O-methylguanosine
  modified_base 5: mod_base = OTHER; note = 2'-O-methylcytidine
  modified_base 6: mod_base = OTHER; note = 2'-fluorocytidine
  modified_base 7: mod_base = OTHER; note = 2'-O-methylcytidine
  modified_base 8: mod_base = OTHER; note = 2'-fluoroguanosine
  modified_base 9: mod_base = OTHER; note = 2'-fluorouridine
  modified_base 10: mod_base = OTHER; note = 2'-O-methyladenosine
  modified_base 11: mod_base = OTHER; note = 2'-O-methylguanosine
  modified_base 12: mod_base = OTHER; note = 2'-O-methyladenosine
  modified_base 13: mod_base = OTHER; note = 2'-O-methyladenosine
  modified_base 14: mod_base = OTHER; note = 2'-fluorouridine
  modified_base 15: mod_base = OTHER; note = 2'-O-methylguanosine
  modified_base 16: mod_base = OTHER; note = 2'-fluorouridine
  modified_base 17: mod_base = OTHER; note = 2'-O-methylguanosine
  modified_base 18: mod_base = OTHER; note = 2'-O-methylguanosine
  modified_base 19: mod_base = OTHER; note = 2'-O-methylcytidine with phosphorothioate linkage
  modified_base 20: mod_base = OTHER; note = 2'-O-methyluridine with phosphorothioate linkage
  modified_base 21: mod_base = OTHER; note = 2'-O-methyluridine
tgagcccgtagaatgtggctt

SEQ ID NO: 1094 - RNA, 21 nt, synthetic construct
  source 1..21: mol_type = other RNA
  modified_base 1: mod_base = OTHER; note = 5'-vinyl-phosphonate-2'-O-methyluridine with phosphorothioate linkage
  modified_base 2: mod_base = OTHER; note = 2'-fluoroadenosine with phosphorothioate linkage
  modified_base 3: mod_base = OTHER; note = 2'-O-methylguanosine
  modified_base 4: mod_base = OTHER; note = 2'-O-methylcytidine
  modified_base 5: mod_base = OTHER; note = 2'-O-methyluridine
  modified_base 6: mod_base = OTHER; note = 2'-fluorocytidine
  modified_base 7: mod_base = OTHER; note = 2'-O-methylcytidine
  modified_base 8: mod_base = OTHER; note = 2'-fluorocytidine
  modified_base 9: mod_base = OTHER; note = 2'-fluorouridine
  modified_base 10: mod_base = OTHER; note = 2'-O-methylguanosine
  modified_base 11: mod_base = OTHER; note = 2'-O-methyladenosine
  modified_base 12: mod_base = OTHER; note = 2'-O-methylguanosine
  modified_base 13: mod_base = OTHER; note = 2'-O-methyluridine
  modified_base 14: mod_base = OTHER; note = 2'-fluoroadenosine
  modified_base 15: mod_base = OTHER; note = 2'-O-methylcytidine
  modified_base 16: mod_base = OTHER; note = 2'-fluorouridine
  modified_base 17: mod_base = OTHER; note = 2'-O-methyluridine
  modified_base 18: mod_base = OTHER; note = 2'-O-methyluridine
  modified_base 19: mod_base = OTHER; note = 2'-O-methylcytidine with phosphorothioate linkage
  modified_base 20: mod_base = OTHER; note = 2'-O-methyluridine with phosphorothioate linkage
  modified_base 21: mod_base = OTHER; note = 2'-O-methyluridine
tagctccctgagtactttctt

SEQ ID NO: 1095 - RNA, 21 nt, synthetic construct
  source 1..21: mol_type = other RNA
  modified_base 1: mod_base = OTHER; note = 5'-vinyl-phosphonate-2'-O-methyluridine with phosphorothioate linkage
  modified_base 2: mod_base = OTHER; note = 2'-fluorouridine with phosphorothioate linkage
  modified_base 3: mod_base = OTHER; note = 2'-O-methylcytidine
  modified_base 4: mod_base = OTHER; note = 2'-O-methyladenosine
  modified_base 5: mod_base = OTHER; note = 2'-O-methylguanosine
  modified_base 6: mod_base = OTHER; note = 2'-fluoroguanosine
  modified_base 7: mod_base = OTHER; note = 2'-O-methyluridine
  modified_base 8: mod_base = OTHER; note = 2'-fluoroadenosine
  modified_base 9: mod_base = OTHER; note = 2'-fluoroadenosine
  modified_base 10: mod_base = OTHER; note = 2'-O-methylguanosine
  modified_base 11: mod_base = OTHER; note = 2'-O-methylguanosine
  modified_base 12: mod_base = OTHER; note = 2'-O-methylguanosine
  modified_base 13: mod_base = OTHER; note = 2'-O-methyluridine
  modified_base 14: mod_base = OTHER; note = 2'-fluoroadenosine
  modified_base 15: mod_base = OTHER; note = 2'-O-methyluridine
  modified_base 16: mod_base = OTHER; note = 2'-fluoroadenosine
  modified_base 17: mod_base = OTHER; note = 2'-O-methylguanosine
  modified_base 18: mod_base = OTHER; note = 2'-O-methyladenosine
  modified_base 19: mod_base = OTHER; note = 2'-O-methylcytidine with phosphorothioate linkage
  modified_base 20: mod_base = OTHER; note = 2'-O-methyluridine with phosphorothioate linkage
  modified_base 21: mod_base = OTHER; note = 2'-O-methyluridine
ttcaggtaagggtatagactt

SEQ ID NO: 1096 - RNA, 21 nt, synthetic construct
  source 1..21: mol_type = other RNA
  modified_base 1: mod_base = OTHER; note = 5'-vinyl-phosphonate-2'-O-methyluridine with phosphorothioate linkage
  modified_base 2: mod_base = OTHER; note = 2'-fluoroadenosine with phosphorothioate linkage
  modified_base 3: mod_base = OTHER; note = 2'-O-methyladenosine
  modified_base 4: mod_base = OTHER; note = 2'-O-methyluridine
  modified_base 5: mod_base = OTHER; note = 2'-O-methylguanosine
  modified_base 6: mod_base = OTHER; note = 2'-fluorocytidine
  modified_base 7: mod_base = OTHER; note = 2'-O-methyluridine
  modified_base 8: mod_base = OTHER; note = 2'-fluorouridine
  modified_base 9: mod_base = OTHER; note = 2'-fluorouridine
  modified_base 10: mod_base = OTHER; note = 2'-O-methylguanosine
  modified_base 11: mod_base = OTHER; note = 2'-O-methylguanosine
  modified_base 12: mod_base = OTHER; note = 2'-O-methylcytidine
  modified_base 13: mod_base = OTHER; note = 2'-O-methyluridine
  modified_base 14: mod_base = OTHER; note = 2'-fluoroadenosine
  modified_base 15: mod_base = OTHER; note = 2'-O-methylguanosine
  modified_base 16: mod_base = OTHER; note = 2'-fluorocytidine
  modified_base 17: mod_base = OTHER; note = 2'-O-methyladenosine
  modified_base 18: mod_base = OTHER; note = 2'-O-methylguanosine
  modified_base 19: mod_base = OTHER; note = 2'-O-methylcytidine with phosphorothioate linkage
  modified_base 20: mod_base = OTHER; note = 2'-O-methyluridine with phosphorothioate linkage
  modified_base 21: mod_base = OTHER; note = 2'-O-methylcytidine
taatgctttggctagcagctc

SEQ ID NO: 1097 - RNA, 21 nt, synthetic construct
  source 1..21: mol_type = other RNA
  modified_base 1: mod_base = OTHER; note = 5'-vinyl-phosphonate-2'-O-methyluridine with phosphorothioate linkage
  modified_base 2: mod_base = OTHER; note = 2'-fluoroadenosine with phosphorothioate linkage
  modified_base 3: mod_base = OTHER; note = 2'-O-methyluridine
  modified_base 4: mod_base = OTHER; note = 2'-O-methylguanosine
  modified_base 5: mod_base = OTHER; note = 2'-O-methyladenosine
  modified_base 6: mod_base = OTHER; note = 2'-fluorocytidine
  modified_base 7: mod_base = OTHER; note = 2'-O-methyladenosine
  modified_base 8: mod_base = OTHER; note = 2'-fluoroguanosine
  modified_base 9: mod_base = OTHER; note = 2'-fluorocytidine
  modified_base 10: mod_base = OTHER; note = 2'-O-methyladenosine
  modified_base 11: mod_base = OTHER; note = 2'-O-methylcytidine
  modified_base 12: mod_base = OTHER; note = 2'-O-methyluridine
  modified_base 13: mod_base = OTHER; note = 2'-O-methylcytidine
  modified_base 14: mod_base = OTHER; note = 2'-fluorocytidine
  modified_base 15: mod_base = OTHER; note = 2'-O-methyladenosine
  modified_base 16: mod_base = OTHER; note = 2'-fluorocytidine
  modified_base 17: mod_base = OTHER; note = 2'-O-methyluridine
  modified_base 18: mod_base = OTHER; note = 2'-O-methylcytidine
  modified_base 19: mod_base = OTHER; note = 2'-O-methylcytidine with phosphorothioate linkage
  modified_base 20: mod_base = OTHER; note = 2'-O-methyluridine with phosphorothioate linkage
  modified_base 21: mod_base = OTHER; note = 2'-O-methyluridine
tatgacagcactccactcctt

SEQ ID NO: 1098 - RNA, 21 nt, synthetic construct
  source 1..21: mol_type = other RNA
  modified_base 1: mod_base = OTHER; note = 5'-vinyl-phosphonate-2'-O-methyluridine with phosphorothioate linkage
  modified_base 2: mod_base = OTHER; note = 2'-fluoroguanosine with phosphorothioate linkage
  modified_base 3: mod_base = OTHER; note = 2'-O-methyladenosine
  modified_base 4: mod_base = OTHER; note = 2'-O-methylcytidine
  modified_base 5: mod_base = OTHER; note = 2'-O-methyladenosine
  modified_base 6: mod_base = OTHER; note = 2'-fluorouridine
  modified_base 7: mod_base = OTHER; note = 2'-O-methylcytidine
  modified_base 8: mod_base = OTHER; note = 2'-fluorouridine
  modified_base 9: mod_base = OTHER; note = 2'-fluorouridine
  modified_base 10: mod_base = OTHER; note = 2'-O-methylguanosine
  modified_base 11: mod_base = OTHER; note = 2'-O-methyladenosine
  modified_base 12: mod_base = OTHER; note = 2'-O-methyluridine
  modified_base 13: mod_base = OTHER; note = 2'-O-methylcytidine
  modified_base 14: mod_base = OTHER; note = 2'-fluorouridine
  modified_base 15: mod_base = OTHER; note = 2'-O-methyluridine
  modified_base 16: mod_base = OTHER; note = 2'-fluoroguanosine
  modified_base 17: mod_base = OTHER; note = 2'-O-methylguanosine
  modified_base 18: mod_base = OTHER; note = 2'-O-methylcytidine
  modified_base 19: mod_base = OTHER; note = 2'-O-methylcytidine with phosphorothioate linkage
  modified_base 20: mod_base = OTHER; note = 2'-O-methyluridine with phosphorothioate linkage
  modified_base 21: mod_base = OTHER; note = 2'-O-methyluridine
tgacatcttgatcttggcctt

SEQ ID NO: 1099 - RNA, 21 nt, synthetic construct
  source 1..21: mol_type = other RNA
  modified_base 1: mod_base = OTHER; note = 5'-vinyl-phosphonate-2'-O-methyluridine with phosphorothioate linkage
  modified_base 2: mod_base = OTHER; note = 2'-fluoroadenosine with phosphorothioate linkage
  modified_base 3: mod_base = OTHER; note = 2'-O-methyluridine
  modified_base 4: mod_base = OTHER; note = 2'-O-methylguanosine
  modified_base 5: mod_base = OTHER; note = 2'-O-methyladenosine
  modified_base 6: mod_base = OTHER; note = 2'-fluoroadenosine
  modified_base 7: mod_base = OTHER; note = 2'-O-methylguanosine
  modified_base 8: mod_base = OTHER; note = 2'-fluoroadenosine
  modified_base 9: mod_base = OTHER; note = 2'-fluorocytidine
  modified_base 10: mod_base = OTHER; note = 2'-O-methyladenosine
  modified_base 11: mod_base = OTHER; note = 2'-O-methylguanosine
  modified_base 12: mod_base = OTHER; note = 2'-O-methyladenosine
  modified_base 13: mod_base = OTHER; note = 2'-O-methyluridine
  modified_base 14: mod_base = OTHER; note = 2'-fluorocytidine
  modified_base 15: mod_base = OTHER; note = 2'-O-methyluridine
  modified_base 16: mod_base = OTHER; note = 2'-fluorocytidine
  modified_base 17: mod_base = OTHER; note = 2'-O-methyladenosine
  modified_base 18: mod_base = OTHER; note = 2'-O-methyladenosine
  modified_base 19: mod_base = OTHER; note = 2'-O-methylguanosine with phosphorothioate linkage
  modified_base 20: mod_base = OTHER; note = 2'-O-methyluridine with phosphorothioate linkage
  modified_base 21: mod_base = OTHER; note = 2'-O-methyluridine
tatgaagacagatctcaagtt

SEQ ID NO: 1100 - RNA, 21 nt, synthetic construct
  source 1..21: mol_type = other RNA
  modified_base 1: mod_base = OTHER; note = 5'-vinyl-phosphonate-2'-O-methyluridine with phosphorothioate linkage
  modified_base 2: mod_base = OTHER; note = 2'-fluoroadenosine with phosphorothioate linkage
  modified_base 3: mod_base = OTHER; note = 2'-O-methyluridine
  modified_base 4: mod_base = OTHER; note = 2'-O-methylguanosine
  modified_base 5: mod_base = OTHER; note = 2'-O-methyladenosine
  modified_base 6: mod_base = OTHER; note = 2'-fluoroadenosine
  modified_base 7: mod_base = OTHER; note = 2'-O-methylguanosine
  modified_base 8: mod_base = OTHER; note = 2'-fluoroadenosine
  modified_base 9: mod_base = OTHER; note = 2'-fluorocytidine
  modified_base 10: mod_base = OTHER; note = 2'-O-methyladenosine
  modified_base 11: mod_base = OTHER; note = 2'-O-methylguanosine
  modified_base 12: mod_base = OTHER; note = 2'-O-methyladenosine
  modified_base 13: mod_base = OTHER; note = 2'-O-methyluridine
  modified_base 14: mod_base = OTHER; note = 2'-fluorocytidine
  modified_base 15: mod_base = OTHER; note = 2'-O-methyluridine
  modified_base 16: mod_base = OTHER; note = 2'-fluorocytidine
  modified_base 17: mod_base = OTHER; note = 2'-O-methyladenosine
  modified_base 18: mod_base = OTHER; note = 2'-O-methyladenosine
  modified_base 19: mod_base = OTHER; note = 2'-O-methylguanosine with phosphorothioate linkage
  modified_base 20: mod_base = OTHER; note = 2'-O-methylguanosine with phosphorothioate linkage
  modified_base 21: mod_base = OTHER; note = 2'-O-methyluridine
tatgaagacagatctcaaggt

SEQ ID NO: 1101 - RNA, 21 nt, synthetic construct
  source 1..21: mol_type = other RNA
  modified_base 1: mod_base = OTHER; note = 5'-vinyl-phosphonate-2'-O-methyluridine with phosphorothioate linkage
  modified_base 2: mod_base = OTHER; note = 2'-fluoroguanosine with phosphorothioate linkage
  modified_base 3: mod_base = OTHER; note = 2'-O-methyluridine
  modified_base 4: mod_base = OTHER; note = 2'-O-methyluridine
  modified_base 5: mod_base = OTHER; note = 2'-O-methyluridine
  modified_base 6: mod_base = OTHER; note = 2'-fluorouridine
  modified_base 7: mod_base = OTHER; note = 2'-O-methyluridine
  modified_base 8: mod_base = OTHER; note = 2'-fluoroguanosine
  modified_base 9: mod_base = OTHER; note = 2'-fluorouridine
  modified_base 10: mod_base = OTHER; note = 2'-O-methyluridine
  modified_base 11: mod_base = OTHER; note = 2'-O-methyladenosine
  modified_base 12: mod_base = OTHER; note = 2'-O-methylguanosine
  modified_base 13: mod_base = OTHER; note = 2'-O-methyluridine
  modified_base 14: mod_base = OTHER; note = 2'-fluorouridine
  modified_base 15: mod_base = OTHER; note = 2'-O-methyluridine
  modified_base 16: mod_base = OTHER; note = 2'-fluoroguanosine
  modified_base 17: mod_base = OTHER; note = 2'-O-methyladenosine
  modified_base 18: mod_base = OTHER; note = 2'-O-methylguanosine
  modified_base 19: mod_base = OTHER; note = 2'-O-methylguanosine with phosphorothioate linkage
  modified_base 20: mod_base = OTHER; note = 2'-O-methylguanosine with phosphorothioate linkage
  modified_base 21: mod_base = OTHER; note = 2'-O-methylguanosine
tgtttttgttagtttgagggg

SEQ ID NO: 1102 - RNA, 21 nt, synthetic construct
  source 1..21: mol_type = other RNA
  modified_base 1: mod_base = OTHER; note = 5'-vinyl-phosphonate-2'-O-methyluridine with phosphorothioate linkage
  modified_base 2: mod_base = OTHER; note = 2'-fluorouridine with phosphorothioate linkage
  modified_base 3: mod_base = OTHER; note = 2'-O-methylguanosine
  modified_base 4: mod_base = OTHER; note = 2'-O-methyluridine
  modified_base 5: mod_base = OTHER; note = 2'-O-methyluridine
  modified_base 6: mod_base = OTHER; note = 2'-fluorouridine
  modified_base 7: mod_base = OTHER; note = 2'-O-methyluridine
  modified_base 8: mod_base = OTHER; note = 2'-fluorouridine
  modified_base 9: mod_base = OTHER; note = 2'-fluoroguanosine
  modified_base 10: mod_base = OTHER; note = 2'-O-methyluridine
  modified_base 11: mod_base = OTHER; note = 2'-O-methyluridine
  modified_base 12: mod_base = OTHER; note = 2'-O-methyladenosine
  modified_base 13: mod_base = OTHER; note = 2'-O-methylguanosine
  modified_base 14: mod_base = OTHER; note = 2'-fluorouridine
  modified_base 15: mod_base = OTHER; note = 2'-O-methyluridine
  modified_base 16: mod_base = OTHER; note = 2'-fluorouridine
  modified_base 17: mod_base = OTHER; note = 2'-O-methylguanosine
  modified_base 18: mod_base = OTHER; note = 2'-O-methyladenosine
  modified_base 19: mod_base = OTHER; note = 2'-O-methylguanosine with phosphorothioate linkage
  modified_base 20: mod_base = OTHER; note = 2'-O-methylguanosine with phosphorothioate linkage
  modified_base 21: mod_base = OTHER; note = 2'-O-methylguanosine
ttgtttttgttagtttgaggg

SEQ ID NO: 1103 - RNA, 21 nt, synthetic construct
  source 1..21: mol_type = other RNA
  modified_base 1: mod_base = OTHER; note = 5'-vinyl-phosphonate-2'-O-methyluridine with phosphorothioate linkage
  modified_base 2: mod_base = OTHER; note = 2'-fluoroadenosine with phosphorothioate linkage
  modified_base 3: mod_base = OTHER; note = 2'-O-methyladenosine
  modified_base 4: mod_base = OTHER; note = 2'-O-methyluridine
  modified_base 5: mod_base = OTHER; note = 2'-O-methylguanosine
  modified_base 6: mod_base = OTHER; note = 2'-fluorouridine
  modified_base 7: mod_base = OTHER; note = 2'-O-methyluridine
  modified_base 8: mod_base = OTHER; note = 2'-fluorouridine
  modified_base 9: mod_base = OTHER; note = 2'-fluorouridine
  modified_base 10: mod_base = OTHER; note = 2'-O-methyluridine
  modified_base 11: mod_base = OTHER; note = 2'-O-methylguanosine
  modified_base 12: mod_base = OTHER; note = 2'-O-methyluridine
  modified_base 13: mod_base = OTHER; note = 2'-O-methyluridine
  modified_base 14: mod_base = OTHER; note = 2'-fluoroadenosine
  modified_base 15: mod_base = OTHER; note = 2'-O-methylguanosine
  modified_base 16: mod_base = OTHER; note = 2'-fluorouridine
  modified_base 17: mod_base = OTHER; note = 2'-O-methyluridine
  modified_base 18: mod_base = OTHER; note = 2'-O-methyluridine
  modified_base 19: mod_base = OTHER; note = 2'-O-methylguanosine with phosphorothioate linkage
  modified_base 20: mod_base = OTHER; note = 2'-O-methyladenosine with phosphorothioate linkage
  modified_base 21: mod_base = OTHER; note = 2'-O-methylguanosine
taatgtttttgttagtttgag

SEQ ID NO: 1104 - RNA, 21 nt, synthetic construct
  source 1..21: mol_type = other RNA
  modified_base 1: mod_base = OTHER; note = 5'-vinyl-phosphonate-2'-O-methyluridine with phosphorothioate linkage
  modified_base 2: mod_base = OTHER; note = 2'-fluorouridine with phosphorothioate linkage
  modified_base 3: mod_base = OTHER; note = 2'-O-methylguanosine
  modified_base 4: mod_base = OTHER; note = 2'-O-methylguanosine
  modified_base 5: mod_base = OTHER; note = 2'-O-methyladenosine
  modified_base 6: mod_base = OTHER; note = 2'-fluoroadenosine
  modified_base 7: mod_base = OTHER; note = 2'-O-methyladenosine
  modified_base 8: mod_base = OTHER; note = 2'-fluorouridine
  modified_base 9: mod_base = OTHER; note = 2'-fluoroguanosine
  modified_base 10: mod_base = OTHER; note = 2'-O-methyluridine
  modified_base 11: mod_base = OTHER; note = 2'-O-methyluridine
  modified_base 12: mod_base = OTHER; note = 2'-O-methyluridine
  modified_base 13: mod_base = OTHER; note = 2'-O-methyluridine
  modified_base 14: mod_base = OTHER; note = 2'-fluorouridine
  modified_base 15: mod_base = OTHER; note = 2'-O-methylguanosine
  modified_base 16: mod_base = OTHER; note = 2'-fluorouridine
  modified_base 17: mod_base = OTHER; note = 2'-O-methyluridine
  modified_base 18: mod_base = OTHER; note = 2'-O-methyladenosine
  modified_base 19: mod_base = OTHER; note = 2'-O-methylguanosine with phosphorothioate linkage
  modified_base 20: mod_base = OTHER; note = 2'-O-methyluridine with phosphorothioate linkage
  modified_base 21: mod_base = OTHER; note = 2'-O-methyluridine
ttggaaatgtttttgttagtt

SEQ ID NO: 1105 - RNA, 21 nt, synthetic construct
  source 1..21: mol_type = other RNA
  modified_base 1: mod_base = OTHER; note = 5'-vinyl-phosphonate-2'-O-methyluridine with phosphorothioate linkage
  modified_base 2: mod_base = OTHER; note = 2'-fluorouridine with phosphorothioate linkage
  modified_base 3: mod_base = OTHER; note = 2'-O-methyluridine
  modified_base 4: mod_base = OTHER; note = 2'-O-methyladenosine
  modified_base 5: mod_base = OTHER; note = 2'-O-methyluridine
  modified_base 6: mod_base = OTHER; note = 2'-fluorouridine
  modified_base 7: mod_base = OTHER; note = 2'-O-methylguanosine
  modified_base 8: mod_base = OTHER; note = 2'-fluoroguanosine
  modified_base 9: mod_base = OTHER; note = 2'-fluoroadenosine
  modified_base 10: mod_base = OTHER; note = 2'-O-methyladenosine
  modified_base 11: mod_base = OTHER; note = 2'-O-methyladenosine
  modified_base 12: mod_base = OTHER; note = 2'-O-methyluridine
  modified_base 13: mod_base = OTHER; note = 2'-O-methylguanosine
  modified_base 14: mod_base = OTHER; note = 2'-fluorouridine
  modified_base 15: mod_base = OTHER; note = 2'-O-methyluridine
  modified_base 16: mod_base = OTHER; note = 2'-fluorouridine
  modified_base 17: mod_base = OTHER; note = 2'-O-methyluridine
  modified_base 18: mod_base = OTHER; note = 2'-O-methyluridine
  modified_base 19: mod_base = OTHER; note = 2'-O-methylguanosine with phosphorothioate linkage
  modified_base 20: mod_base = OTHER; note = 2'-O-methyluridine with phosphorothioate linkage
  modified_base 21: mod_base = OTHER; note = 2'-O-methyluridine
tttattggaaatgtttttgtt

SEQ ID NO: 1106 - RNA, 21 nt, synthetic construct
  source 1..21: mol_type = other RNA
  modified_base 1: mod_base = OTHER; note = 5'-vinyl-phosphonate-2'-O-methyluridine with phosphorothioate linkage
  modified_base 2: mod_base = OTHER; note = 2'-fluoroadenosine with phosphorothioate linkage
  modified_base 3: mod_base = OTHER; note = 2'-O-methyluridine
  modified_base 4: mod_base = OTHER; note = 2'-O-methyluridine
  modified_base 5: mod_base = OTHER; note = 2'-O-methyluridine
  modified_base 6: mod_base = OTHER; note = 2'-fluoroguanosine
  modified_base 7: mod_base = OTHER; note = 2'-O-methyladenosine
  modified_base 8: mod_base = OTHER; note = 2'-fluorouridine
  modified_base 9: mod_base = OTHER; note = 2'-fluoroadenosine
  modified_base 10: mod_base = OTHER; note = 2'-O-methyluridine
  modified_base 11: mod_base = OTHER; note = 2'-O-methyluridine
  modified_base 12: mod_base = OTHER; note = 2'-O-methyluridine
  modified_base 13: mod_base = OTHER; note = 2'-O-methyluridine
  modified_base 14: mod_base = OTHER; note = 2'-fluorouridine
  modified_base 15: mod_base = OTHER; note = 2'-O-methyladenosine
  modified_base 16: mod_base = OTHER; note = 2'-fluorouridine
  modified_base 17: mod_base = OTHER; note = 2'-O-methyluridine
  modified_base 18: mod_base = OTHER; note = 2'-O-methylguanosine
  modified_base 19: mod_base = OTHER; note = 2'-O-methylguanosine with phosphorothioate linkage
  modified_base 20: mod_base = OTHER; note = 2'-O-methyladenosine with phosphorothioate linkage
  modified_base 21: mod_base = OTHER; note = 2'-O-methyladenosine
tatttgatatttttattggaa

SEQ ID NO: 1107 - RNA, 21 nt, synthetic construct
  source 1..21: mol_type = other RNA
  modified_base 1: mod_base = OTHER; note = 5'-vinyl-phosphonate-2'-O-methyluridine with phosphorothioate linkage
  modified_base 2: mod_base = OTHER; note = 2'-fluorouridine with phosphorothioate linkage
  modified_base 3: mod_base = OTHER; note = 2'-O-methyladenosine
  modified_base 4: mod_base = OTHER; note = 2'-O-methyluridine
  modified_base 5: mod_base = OTHER; note = 2'-O-methyluridine
  modified_base 6: mod_base = OTHER; note = 2'-fluorouridine
  modified_base 7: mod_base = OTHER; note = 2'-O-methylguanosine
  modified_base 8: mod_base = OTHER; note = 2'-fluoroadenosine
  modified_base 9: mod_base = OTHER; note = 2'-fluorouridine
  modified_base 10: mod_base = OTHER; note = 2'-O-methyladenosine
  modified_base 11: mod_base = OTHER; note = 2'-O-methyluridine
  modified_base 12: mod_base = OTHER; note = 2'-O-methyluridine
  modified_base 13: mod_base = OTHER; note = 2'-O-methyluridine
  modified_base 14: mod_base = OTHER; note = 2'-fluorouridine
  modified_base 15: mod_base = OTHER; note = 2'-O-methyluridine
  modified_base 16: mod_base = OTHER; note = 2'-fluoroadenosine
  modified_base 17: mod_base = OTHER; note = 2'-O-methyluridine
  modified_base 18: mod_base = OTHER; note = 2'-O-methyluridine
  modified_base 19: mod_base = OTHER; note = 2'-O-methylguanosine with phosphorothioate linkage
  modified_base 20: mod_base = OTHER; note = 2'-O-methylguanosine with phosphorothioate linkage
  modified_base 21: mod_base = OTHER; note = 2'-O-methyladenosine
ttatttgatatttttattgga

SEQ ID NO: 1108 - RNA, 21 nt, synthetic construct
  source 1..21: mol_type = other RNA
  modified_base 1: mod_base = OTHER; note = 5'-vinyl-phosphonate-2'-O-methyluridine with phosphorothioate linkage
  modified_base 2: mod_base = OTHER; note = 2'-fluoroguanosine with phosphorothioate linkage
  modified_base 3: mod_base = OTHER; note = 2'-O-methylguanosine
  modified_base 4: mod_base = OTHER; note = 2'-O-methylguanosine
  modified_base 5: mod_base = OTHER; note = 2'-O-methyluridine
  modified_base 6: mod_base = OTHER; note = 2'-fluorocytidine
  modified_base 7: mod_base = OTHER; note = 2'-O-methyluridine
  modified_base 8: mod_base = OTHER; note = 2'-fluorocytidine
  modified_base 9: mod_base = OTHER; note = 2'-fluorocytidine
  modified_base 10: mod_base = OTHER; note = 2'-O-methyladenosine
  modified_base 11: mod_base = OTHER; note = 2'-O-methyladenosine
  modified_base 12: mod_base = OTHER; note = 2'-O-methyluridine
  modified_base 13: mod_base = OTHER; note = 2'-O-methylguanosine
  modified_base 14: mod_base = OTHER; note = 2'-fluorocytidine
  modified_base 15: mod_base = OTHER; note = 2'-O-methyluridine
  modified_base 16: mod_base = OTHER; note = 2'-fluorouridine
  modified_base 17: mod_base = OTHER; note = 2'-O-methyluridine
  modified_base 18: mod_base = OTHER; note = 2'-O-methylguanosine
  modified_base 19: mod_base = OTHER; note = 2'-O-methylguanosine with phosphorothioate linkage
  modified_base 20: mod_base = OTHER; note = 2'-O-methyluridine with phosphorothioate linkage
  modified_base 21: mod_base = OTHER; note = 2'-O-methyluridine
tgggtctccaatgctttggtt

SEQ ID NO: 1109 - RNA, 21 nt, synthetic construct
  source 1..21: mol_type = other RNA
  modified_base 1: mod_base = OTHER; note = 5'-vinyl-phosphonate-2'-O-methyluridine with phosphorothioate linkage
  modified_base 2: mod_base = OTHER; note = 2'-fluoroadenosine with phosphorothioate linkage
  modified_base 3: mod_base = OTHER; note = 2'-O-methyluridine
  modified_base 4: mod_base = OTHER; note = 2'-O-methyladenosine
  modified_base 5: mod_base = OTHER; note = 2'-O-methyluridine
  modified_base 6: mod_base = OTHER; note = 2'-fluorouridine
  modified_base 7: mod_base = OTHER; note = 2'-O-methyladenosine
  modified_base 8: mod_base = OTHER; note = 2'-fluoroguanosine
  modified_base 9: mod_base = OTHER; note = 2'-fluoroadenosine
  modified_base 10: mod_base = OTHER; note = 2'-O-methyluridine
  modified_base 11: mod_base = OTHER; note = 2'-O-methyladenosine
  modified_base 12: mod_base = OTHER; note = 2'-O-methylcytidine
  modified_base 13: mod_base = OTHER; note = 2'-O-methyluridine
  modified_base 14: mod_base = OTHER; note = 2'-fluoroguanosine
  modified_base 15: mod_base = OTHER; note = 2'-O-methyladenosine
  modified_base 16: mod_base = OTHER; note = 2'-fluorocytidine
  modified_base 17: mod_base = OTHER; note = 2'-O-methylcytidine
  modified_base 18: mod_base = OTHER; note = 2'-O-methyluridine
  modified_base 19: mod_base = OTHER; note = 2'-O-methylguanosine with phosphorothioate linkage
  modified_base 20: mod_base = OTHER; note = 2'-O-methyluridine with phosphorothioate linkage
  modified_base 21: mod_base = OTHER; note = 2'-O-methyluridine
tatattagatactgacctgtt

SEQ ID NO: 1110 - RNA, 21 nt, synthetic construct
  source 1..21: mol_type = other RNA
  modified_base 1: mod_base = OTHER; note = 5'-vinyl-phosphonate-2'-O-methyluridine with phosphorothioate linkage
  modified_base 2: mod_base = OTHER; note = 2'-fluoroadenosine with phosphorothioate linkage
  modified_base 3: mod_base = OTHER; note = 2'-O-methylguanosine
  modified_base 4: mod_base = OTHER; note = 2'-O-methyladenosine
  modified_base 5: mod_base = OTHER; note = 2'-O-methyladenosine
  modified_base 6: mod_base = OTHER; note = 2'-fluorouridine
  modified_base 7: mod_base = OTHER; note = 2'-O-methylguanosine
  modified_base 8: mod_base = OTHER; note = 2'-fluorouridine
  modified_base 9: mod_base = OTHER; note = 2'-fluoroguanosine
  modified_base 10: mod_base = OTHER; note = 2'-O-methylguanosine
  modified_base 11: mod_base = OTHER; note = 2'-O-methylcytidine
  modified_base 12: mod_base = OTHER; note = 2'-O-methyluridine
  modified_base 13: mod_base = OTHER; note = 2'-O-methyluridine
  modified_base 14: mod_base = OTHER; note = 2'-fluorouridine
  modified_base 15: mod_base = OTHER; note = 2'-O-methylguanosine
  modified_base 16: mod_base = OTHER; note = 2'-fluoroadenosine
  modified_base 17: mod_base = OTHER; note = 2'-O-methylcytidine
  modified_base 18: mod_base = OTHER; note = 2'-O-methyladenosine
  modified_base 19: mod_base = OTHER; note = 2'-O-methyluridine with phosphorothioate linkage
  modified_base 20: mod_base = OTHER; note = 2'-O-methyluridine with phosphorothioate linkage
  modified_base 21: mod_base = OTHER; note = 2'-O-methylcytidine
tagaatgtggctttgacattc

SEQ ID NO: 1111 - RNA, 21 nt, synthetic construct
  source 1..21: mol_type = other RNA
  modified_base 1: mod_base = OTHER; note = 5'-vinyl-phosphonate-2'-O-methyluridine with phosphorothioate linkage
  modified_base 2: mod_base = OTHER; note = 2'-fluorocytidine with phosphorothioate linkage
  modified_base 3: mod_base = OTHER; note = 2'-O-methyladenosine
  modified_base 4: mod_base = OTHER; note = 2'-O-methyladenosine
  modified_base 5: mod_base = OTHER; note = 2'-O-methylcytidine
  modified_base 6: mod_base = OTHER; note = 2'-fluorouridine
  modified_base 7: mod_base = OTHER; note = 2'-O-methylcytidine
  modified_base 8: mod_base = OTHER; note = 2'-fluoroadenosine
  modified_base 9: mod_base = OTHER; note = 2'-fluorouridine
  modified_base 10: mod_base = OTHER; note = 2'-O-methyladenosine
  modified_base 11: mod_base = OTHER; note = 2'-O-methylguanosine
  modified_base 12: mod_base = OTHER; note = 2'-O-methyladenosine
  modified_base 13: mod_base = OTHER; note = 2'-O-methylguanosine
  modified_base 14: mod_base = OTHER; note = 2'-fluorouridine
  modified_base 15: mod_base = OTHER; note = 2'-O-methyladenosine
  modified_base 16: mod_base = OTHER; note = 2'-fluoroguanosine
  modified_base 17: mod_base = OTHER; note = 2'-O-methyladenosine
  modified_base 18: mod_base = OTHER; note = 2'-O-methylguanosine
  modified_base 19: mod_base = OTHER; note = 2'-O-methylcytidine with phosphorothioate linkage
  modified_base 20: mod_base = OTHER; note = 2'-O-methyluridine with phosphorothioate linkage
  modified_base 21: mod_base = OTHER; note = 2'-O-methyluridine
tcaactcatagagtagagctt

SEQ ID NO: 1112 - RNA, 21 nt, synthetic construct
  source 1..21: mol_type = other RNA
  modified_base 1: mod_base = OTHER; note = 5'-vinyl-phosphonate-2'-O-methyluridine with phosphorothioate linkage
  modified_base 2: mod_base = OTHER; note = 2'-fluoroguanosine with phosphorothioate linkage
  modified_base 3: mod_base = OTHER; note = 2'-O-methyladenosine
  modified_base 4: mod_base = OTHER; note = 2'-O-methyladenosine
  modified_base 5: mod_base = OTHER; note = 2'-O-methyladenosine
  modified_base 6: mod_base = OTHER; note = 2'-fluoroguanosine
  modified_base 7: mod_base = OTHER; note = 2'-O-methyluridine
  modified_base 8: mod_base = OTHER; note = 2'-fluorocytidine
  modified_base 9: mod_base = OTHER; note = 2'-fluoroadenosine
  modified_base 10: mod_base = OTHER; note = 2'-O-methylcytidine
  modified_base 11: mod_base = OTHER; note = 2'-O-methyladenosine
  modified_base 12: mod_base = OTHER; note = 2'-O-methyladenosine
  modified_base 13: mod_base = OTHER; note = 2'-O-methylcytidine
  modified_base 14: mod_base = OTHER; note = 2'-fluorouridine
  modified_base 15: mod_base = OTHER; note = 2'-O-methylcytidine
  modified_base 16: mod_base = OTHER; note = 2'-fluoroadenosine
  modified_base 17: mod_base = OTHER; note = 2'-O-methyluridine
  modified_base 18: mod_base = OTHER; note = 2'-O-methyladenosine
  modified_base 19: mod_base = OTHER; note = 2'-O-methylguanosine with phosphorothioate linkage
  modified_base 20: mod_base = OTHER; note = 2'-O-methyladenosine with phosphorothioate linkage
  modified_base 21: mod_base = OTHER; note = 2'-O-methylguanosine
tgaaagtcacaactcatagag

SEQ ID NO: 1113 - RNA, 21 nt, synthetic construct
  source 1..21: mol_type = other RNA
  modified_base 1: mod_base = OTHER; note = 5'-vinyl-phosphonate-2'-O-methyluridine with phosphorothioate linkage
  modified_base 2: mod_base = OTHER; note = 2'-fluorouridine with phosphorothioate linkage
  modified_base 3: mod_base = OTHER; note = 2'-O-methylguanosine
  modified_base 4: mod_base = OTHER; note = 2'-O-methyladenosine
  modified_base 5: mod_base = OTHER; note = 2'-O-methyladenosine
  modified_base 6: mod_base = OTHER; note = 2'-fluoroadenosine
  modified_base 7: mod_base = OTHER; note = 2'-O-methylguanosine
  modified_base 8: mod_base = OTHER; note = 2'-fluorouridine
  modified_base 9: mod_base = OTHER; note = 2'-fluorocytidine
  modified_base 10: mod_base = OTHER; note = 2'-O-methyladenosine
  modified_base 11: mod_base = OTHER; note = 2'-O-methylcytidine
  modified_base 12: mod_base = OTHER; note = 2'-O-methyladenosine
  modified_base 13: mod_base = OTHER; note = 2'-O-methyladenosine
  modified_base 14: mod_base = OTHER; note = 2'-fluorocytidine
  modified_base 15: mod_base = OTHER; note = 2'-O-methyluridine
  modified_base 16: mod_base = OTHER; note = 2'-fluorocytidine
  modified_base 17: mod_base = OTHER; note = 2'-O-methyladenosine
  modified_base 18: mod_base = OTHER; note = 2'-O-methyluridine
  modified_base 19: mod_base = OTHER; note = 2'-O-methyladenosine with phosphorothioate linkage
  modified_base 20: mod_base = OTHER; note = 2'-O-methylguanosine with phosphorothioate linkage
  modified_base 21: mod_base = OTHER; note = 2'-O-methyladenosine
ttgaaagtcacaactcataga

SEQ ID NO: 1114 - RNA, 21 nt, synthetic construct
  source 1..21: mol_type = other RNA
  modified_base 1: mod_base = OTHER; note = 5'-vinyl-phosphonate-2'-O-methyluridine with phosphorothioate linkage
  modified_base 2: mod_base = OTHER; note = 2'-fluoroguanosine with phosphorothioate linkage
  modified_base 3: mod_base = OTHER; note = 2'-O-methyladenosine
  modified_base 4: mod_base = OTHER; note = 2'-O-methylguanosine
  modified_base 5: mod_base = OTHER; note = 2'-O-methyluridine
  modified_base 6: mod_base = OTHER; note = 2'-fluoroadenosine
  modified_base 7: mod_base = OTHER; note = 2'-O-methylcytidine
  modified_base 8: mod_base = OTHER; note = 2'-fluorouridine
  modified_base 9: mod_base = OTHER; note = 2'-fluorouridine
  modified_base 10: mod_base = OTHER; note = 2'-O-methyluridine
  modified_base 11: mod_base = OTHER; note = 2'-O-methylcytidine
  modified_base 12: mod_base = OTHER; note = 2'-O-methyluridine
  modified_base 13: mod_base = OTHER; note = 2'-O-methyluridine
  modified_base 14: mod_base = OTHER; note = 2'-fluorouridine
  modified_base 15: mod_base = OTHER; note = 2'-O-methylguanosine
  modified_base 16: mod_base = OTHER; note = 2'-fluoroguanosine
  modified_base 17: mod_base = OTHER; note = 2'-O-methylguanosine
  modified_base 18: mod_base = OTHER; note = 2'-O-methylcytidine
  modified_base 19: mod_base = OTHER; note = 2'-O-methylcytidine with phosphorothioate linkage
  modified_base 20: mod_base = OTHER; note = 2'-O-methyluridine with phosphorothioate linkage
  modified_base 21: mod_base = OTHER; note = 2'-O-methyluridine
tgagtactttctttgggcctt

SEQ ID NO: 1115 - RNA, 21 nt, synthetic construct
  source 1..21: mol_type = other RNA
  modified_base 1: mod_base = OTHER; note = 5'-vinyl-phosphonate-2'-O-methyluridine with phosphorothioate linkage
  modified_base 2: mod_base = OTHER; note = 2'-fluorouridine with phosphorothioate linkage
  modified_base 3: mod_base = OTHER; note = 2'-O-methyluridine
  modified_base 4: mod_base = OTHER; note = 2'-O-methylcytidine
  modified_base 5: mod_base = OTHER; note = 2'-O-methylcytidine
  modified_base 6: mod_base = OTHER; note = 2'-fluorocytidine
  modified_base 7: mod_base = OTHER; note = 2'-O-methyladenosine
  modified_base 8: mod_base = OTHER; note = 2'-fluoroguanosine
  modified_base 9: mod_base = OTHER; note = 2'-fluorocytidine
  modified_base 10: mod_base = OTHER; note = 2'-O-methyladenosine
  modified_base 11: mod_base = OTHER; note = 2'-O-methyladenosine
  modified_base 12: mod_base = OTHER; note = 2'-O-methylcytidine
  modified_base 13: mod_base = OTHER; note = 2'-O-methyladenosine
  modified_base 14: mod_base = OTHER; note = 2'-fluorouridine
  modified_base 15: mod_base = OTHER; note = 2'-O-methyladenosine
  modified_base 16: mod_base = OTHER; note = 2'-fluorouridine
  modified_base 17: mod_base = OTHER; note = 2'-O-methylguanosine
  modified_base 18: mod_base = OTHER; note = 2'-O-methylguanosine
  modified_base 19: mod_base = OTHER; note = 2'-O-methylcytidine with phosphorothioate linkage
  modified_base 20: mod_base = OTHER; note = 2'-O-methyluridine with phosphorothioate linkage
  modified_base 21: mod_base = OTHER; note = 2'-O-methyluridine
tttcccagcaacatatggctt

SEQ ID NO: 1116 - RNA, 21 nt, synthetic construct
  source 1..21: mol_type = other RNA
  modified_base 1: mod_base = OTHER; note = 5'-vinyl-phosphonate-2'-O-methyluridine with phosphorothioate linkage
  modified_base 2: mod_base = OTHER; note = 2'-fluorocytidine with phosphorothioate linkage
  modified_base 3: mod_base = OTHER; note = 2'-O-methyladenosine
  modified_base 4: mod_base = OTHER; note = 2'-O-methyluridine
  modified_base 5: mod_base = OTHER; note = 2'-O-methyladenosine
  modified_base 6: mod_base = OTHER; note = 2'-fluoroguanosine
  modified_base 7: mod_base = OTHER; note = 2'-O-methyluridine
  modified_base 8: mod_base = OTHER; note = 2'-fluorocytidine
  modified_base 9: mod_base = OTHER; note = 2'-fluorouridine
  modified_base 10: mod_base = OTHER; note = 2'-O-methyluridine
  modified_base 11: mod_base = OTHER; note = 2'-O-methyluridine
  modified_base 12: mod_base = OTHER; note = 2'-O-methylguanosine
  modified_base 13: mod_base = OTHER; note = 2'-O-methylcytidine
  modified_base 14: mod_base = OTHER; note = 2'-fluoroadenosine
  modified_base 15: mod_base = OTHER; note = 2'-O-methylguanosine
  modified_base 16: mod_base = OTHER; note = 2'-fluorouridine
  modified_base 17: mod_base = OTHER; note = 2'-O-methylguanosine
  modified_base 18: mod_base = OTHER; note = 2'-O-methylguanosine
  modified_base 19: mod_base = OTHER; note = 2'-O-methylguanosine with phosphorothioate linkage
  modified_base 20: mod_base = OTHER; note = 2'-O-methyluridine with phosphorothioate linkage
  modified_base 21: mod_base = OTHER; note = 2'-O-methyluridine
tcatagtctttgcagtgggtt

SEQ ID NO: 1117 - RNA, 21 nt, synthetic construct
  source 1..21: mol_type = other RNA
  modified_base 1: mod_base = OTHER; note = 5'-vinyl-phosphonate-2'-O-methyluridine with phosphorothioate linkage
  modified_base 2: mod_base = OTHER; note = 2'-fluorouridine with phosphorothioate linkage
  modified_base 3: mod_base = OTHER; note = 2'-O-methyluridine
  modified_base 4: mod_base = OTHER; note = 2'-O-methyluridine
  modified_base 5: mod_base = OTHER; note = 2'-O-methylguanosine
  modified_base 6: mod_base = OTHER; note = 2'-fluoroadenosine
  modified_base 7: mod_base = OTHER; note = 2'-O-methyluridine
  modified_base 8: mod_base = OTHER; note = 2'-fluoroguanosine
  modified_base 9: mod_base = OTHER; note = 2'-fluorocytidine
  modified_base 10: mod_base = OTHER; note = 2'-O-methyluridine
  modified_base 11: mod_base = OTHER; note = 2'-O-methylguanosine
  modified_base 12: mod_base = OTHER; note = 2'-O-methyluridine
  modified_base 13: mod_base = OTHER; note = 2'-O-methylcytidine
  modified_base 14: mod_base = OTHER; note = 2'-fluoroadenosine
  modified_base 15: mod_base = OTHER; note = 2'-O-methyluridine
  modified_base 16: mod_base = OTHER; note = 2'-fluoroadenosine
  modified_base 17: mod_base = OTHER; note = 2'-O-methylguanosine
  modified_base 18: mod_base = OTHER; note = 2'-O-methyluridine
  modified_base 19: mod_base = OTHER; note = 2'-O-methylcytidine with phosphorothioate linkage
  modified_base 20: mod_base = OTHER; note = 2'-O-methyluridine with phosphorothioate linkage
  modified_base 21: mod_base = OTHER; note = 2'-O-methyluridine
ttttgatgctgtcatagtctt

SEQ ID NO: 1118 - RNA, 21 nt, synthetic construct
  source 1..21: mol_type = other RNA
  modified_base 1: mod_base = OTHER; note = 5'-vinyl-phosphonate-2'-O-methyluridine with phosphorothioate linkage
  modified_base 2: mod_base = OTHER; note = 2'-fluoroadenosine with phosphorothioate linkage
  modified_base 3: mod_base = OTHER; note = 2'-O-methyladenosine
  modified_base 4: mod_base = OTHER; note = 2'-O-methyluridine
  modified_base 5: mod_base = OTHER; note = 2'-O-methyluridine
  modified_base 6: mod_base = OTHER; note = 2'-fluorouridine
  modified_base 7: mod_base = OTHER; note = 2'-O-methylguanosine
  modified_base 8: mod_base = OTHER; note = 2'-fluoroadenosine
  modified_base 9: mod_base = OTHER; note = 2'-fluorouridine
  modified_base 10: mod_base = OTHER; note = 2'-O-methylguanosine
  modified_base 11: mod_base = OTHER; note = 2'-O-methylcytidine
  modified_base 12: mod_base = OTHER; note = 2'-O-methyluridine
  modified_base 13: mod_base = OTHER; note = 2'-O-methylguanosine
  modified_base 14: mod_base = OTHER; note = 2'-fluorouridine
  modified_base 15: mod_base = OTHER; note = 2'-O-methylcytidine
  modified_base 16: mod_base = OTHER; note = 2'-fluoroadenosine
  modified_base 17: mod_base = OTHER; note = 2'-O-methyluridine
  modified_base 18: mod_base = OTHER; note = 2'-O-methyladenosine
  modified_base 19: mod_base = OTHER; note = 2'-O-methylguanosine with phosphorothioate linkage
  modified_base 20: mod_base = OTHER; note = 2'-O-methyluridine with phosphorothioate linkage
  modified_base 21: mod_base = OTHER; note = 2'-O-methylcytidine
taatttgatgctgtcatagtc

SEQ ID NO: 1119 - RNA, 21 nt, synthetic construct
  source 1..21: mol_type = other RNA
  modified_base 1: mod_base = OTHER; note = 5'-vinyl-phosphonate-2'-O-methyluridine with phosphorothioate linkage
  modified_base 2: mod_base = OTHER; note = 2'-fluoroadenosine with phosphorothioate linkage
  modified_base 3: mod_base = OTHER; note = 2'-O-methyladenosine
  modified_base 4: mod_base = OTHER; note = 2'-O-methylguanosine
  modified_base 5: mod_base = OTHER; note = 2'-O-methyladenosine
  modified_base 6: mod_base = OTHER; note = 2'-fluoroadenosine
  modified_base 7: mod_base = OTHER; note = 2'-O-methylcytidine
  modified_base 8: mod_base = OTHER; note = 2'-fluoroadenosine
  modified_base 9: mod_base = OTHER; note = 2'-fluoroguanosine
  modified_base 10: mod_base = OTHER; note = 2'-O-methylcytidine
  modified_base 11: mod_base = OTHER; note = 2'-O-methyladenosine
  modified_base 12: mod_base = OTHER; note = 2'-O-methyluridine
  modified_base 13: mod_base = OTHER; note = 2'-O-methyluridine
  modified_base 14: mod_base = OTHER; note = 2'-fluorocytidine
  modified_base 15: mod_base = OTHER; note = 2'-O-methyluridine
  modified_base 16: mod_base = OTHER; note = 2'-fluorouridine
  modified_base 17: mod_base = OTHER; note = 2'-O-methylcytidine
  modified_base 18: mod_base = OTHER; note = 2'-O-methyladenosine
  modified_base 19: mod_base = OTHER; note = 2'-O-methylguanosine with phosphorothioate linkage
  modified_base 20: mod_base = OTHER; note = 2'-O-methyluridine with phosphorothioate linkage
  modified_base 21: mod_base = OTHER; note = 2'-O-methyluridine
taagaacagcattcttcagtt

SEQ ID NO: 1120 - RNA, 21 nt, synthetic construct
  source 1..21: mol_type = other RNA
  modified_base 1: mod_base = OTHER; note = 5'-vinyl-phosphonate-2'-O-methyluridine with phosphorothioate linkage
  modified_base 2: mod_base = OTHER; note = 2'-fluoroadenosine with phosphorothioate linkage
  modified_base 3: mod_base = OTHER; note = 2'-O-methyladenosine
  modified_base 4: mod_base = OTHER; note = 2'-O-methylguanosine
  modified_base 5: mod_base = OTHER; note = 2'-O-methyladenosine
  modified_base 6: mod_base = OTHER; note = 2'-fluoroadenosine
  modified_base 7: mod_base = OTHER; note = 2'-O-methylcytidine
  modified_base 8: mod_base = OTHER; note = 2'-fluoroadenosine
  modified_base 9: mod_base = OTHER; note = 2'-fluoroguanosine
  modified_base 10: mod_base = OTHER; note = 2'-O-methylcytidine
  modified_base 11: mod_base = OTHER; note = 2'-O-methyladenosine
  modified_base 12: mod_base = OTHER; note = 2'-O-methyluridine
  modified_base 13: mod_base = OTHER; note = 2'-O-methyluridine
  modified_base 14: mod_base = OTHER; note = 2'-fluorocytidine
  modified_base 15: mod_base = OTHER; note = 2'-O-methyluridine
  modified_base 16: mod_base = OTHER; note = 2'-fluorouridine
  modified_base 17: mod_base = OTHER; note = 2'-O-methylcytidine
  modified_base 18: mod_base = OTHER; note = 2'-O-methyladenosine
  modified_base 19: mod_base = OTHER; note = 2'-O-methylguanosine with phosphorothioate linkage
  modified_base 20: mod_base = OTHER; note = 2'-O-methylguanosine with phosphorothioate linkage
  modified_base 21: mod_base = OTHER; note = 2'-O-methyluridine
taagaacagcattcttcaggt

SEQ ID NO: 1121 - RNA, 21 nt, synthetic construct
  source 1..21: mol_type = other RNA
  modified_base 1: mod_base = OTHER; note = 5'-vinyl-phosphonate-2'-O-methyluridine with phosphorothioate linkage
  modified_base 2: mod_base = OTHER; note = 2'-fluorouridine with phosphorothioate linkage
  modified_base 3: mod_base = OTHER; note = 2'-O-methylguanosine
  modified_base 4: mod_base = OTHER; note = 2'-O-methyladenosine
  modified_base 5: mod_base = OTHER; note = 2'-O-methyluridine
  modified_base 6: mod_base = OTHER; note = 2'-fluorocytidine
  modified_base 7: mod_base = OTHER; note = 2'-O-methyluridine
  modified_base 8: mod_base = OTHER; note = 2'-fluorouridine
  modified_base 9: mod_base = OTHER; note = 2'-fluoroguanosine
  modified_base 10: mod_base = OTHER; note = 2'-O-methylguanosine
  modified_base 11: mod_base = OTHER; note = 2'-O-methylcytidine
  modified_base 12: mod_base = OTHER; note = 2'-O-methylcytidine
  modified_base 13: mod_base = OTHER; note = 2'-O-methyluridine
  modified_base 14: mod_base = OTHER; note = 2'-fluorouridine
  modified_base 15: mod_base = OTHER; note = 2'-O-methyluridine
  modified_base 16: mod_base = OTHER; note = 2'-fluorocytidine
  modified_base 17: mod_base = OTHER; note = 2'-O-methyladenosine
  modified_base 18: mod_base = OTHER; note = 2'-O-methylguanosine
  modified_base 19: mod_base = OTHER; note = 2'-O-methylguanosine with phosphorothioate linkage
  modified_base 20: mod_base = OTHER; note = 2'-O-methyluridine with phosphorothioate linkage
  modified_base 21: mod_base = OTHER; note = 2'-O-methyluridine
ttgatcttggcctttcaggtt

SEQ ID NO: 1122 - RNA, 21 nt, synthetic construct
  source 1..21: mol_type = other RNA
  modified_base 1: mod_base = OTHER; note = 5'-vinyl-phosphonate-2'-O-methyluridine with phosphorothioate linkage
  modified_base 2: mod_base = OTHER; note = 2'-fluorouridine with phosphorothioate linkage
  modified_base 3: mod_base = OTHER; note = 2'-O-methylguanosine
  modified_base 4: mod_base = OTHER; note = 2'-O-methyladenosine
  modified_base 5: mod_base = OTHER; note = 2'-O-methyluridine
  modified_base 6: mod_base = OTHER; note = 2'-fluorocytidine
  modified_base 7: mod_base = OTHER; note = 2'-O-methyluridine
  modified_base 8: mod_base = OTHER; note = 2'-fluorouridine
  modified_base 9: mod_base = OTHER; note = 2'-fluoroguanosine
  modified_base 10: mod_base = OTHER; note = 2'-O-methylguanosine
  modified_base 11: mod_base = OTHER; note = 2'-O-methylcytidine
  modified_base 12: mod_base = OTHER; note = 2'-O-methylcytidine
  modified_base 13: mod_base = OTHER; note = 2'-O-methyluridine
  modified_base 14: mod_base = OTHER; note = 2'-fluorouridine
  modified_base 15: mod_base = OTHER; note = 2'-O-methyluridine
  modified_base 16: mod_base = OTHER; note = 2'-fluorocytidine
  modified_base 17: mod_base = OTHER; note = 2'-O-methyladenosine
  modified_base 18: mod_base = OTHER; note = 2'-O-methylguanosine
  modified_base 19: mod_base = OTHER; note = 2'-O-methylguanosine with phosphorothioate linkage
  modified_base 20: mod_base = OTHER; note = 2'-O-methylguanosine with phosphorothioate linkage
  modified_base 21: mod_base = OTHER; note = 2'-O-methylcytidine
ttgatcttggcctttcagggc

SEQ ID NO: 1123 - RNA, 21 nt, synthetic construct
  source 1..21: mol_type = other RNA
  modified_base 1: mod_base = OTHER; note = 5'-vinyl-phosphonate-2'-O-methyluridine with phosphorothioate linkage
  modified_base 2: mod_base = OTHER; note = 2'-fluorouridine with phosphorothioate linkage
  modified_base 3: mod_base = OTHER; note = 2'-O-methyluridine
  modified_base 4: mod_base = OTHER; note = 2'-O-methyladenosine
  modified_base 5: mod_base = OTHER; note = 2'-O-methylguanosine
  modified_base 6: mod_base = OTHER; note = 2'-fluoroadenosine
  modified_base 7: mod_base = OTHER; note = 2'-O-methyluridine
  modified_base 8: mod_base = OTHER; note = 2'-fluoroguanosine
  modified_base 9: mod_base = OTHER; note = 2'-fluorouridine
  modified_base 10: mod_base = OTHER; note = 2'-O-methyladenosine
  modified_base 11: mod_base = OTHER; note = 2'-O-methylguanosine
  modified_base 12: mod_base = OTHER; note = 2'-O-methylcytidine
  modified_base 13: mod_base = OTHER; note = 2'-O-methyladenosine
  modified_base 14: mod_base = OTHER; note = 2'-fluoroguanosine
  modified_base 15: mod_base = OTHER; note = 2'-O-methylcytidine
  modified_base 16: mod_base = OTHER; note = 2'-fluoroadenosine
  modified_base 17: mod_base = OTHER; note = 2'-O-methylguanosine
  modified_base 18: mod_base = OTHER; note = 2'-O-methyluridine
  modified_base 19: mod_base = OTHER; note = 2'-O-methylcytidine with phosphorothioate linkage
  modified_base 20: mod_base = OTHER; note = 2'-O-methyluridine with phosphorothioate linkage
  modified_base 21: mod_base = OTHER; note = 2'-O-methyluridine
tttagatgtagcagcagtctt

SEQ ID NO: 1124 - RNA, 21 nt, synthetic construct
  source 1..21: mol_type = other RNA
  modified_base 1: mod_base = OTHER; note = 5'-vinyl-phosphonate-2'-O-methyluridine with phosphorothioate linkage
  modified_base 2: mod_base = OTHER; note = 2'-fluorouridine with phosphorothioate linkage
  modified_base 3: mod_base = OTHER; note = 2'-O-methyladenosine
  modified_base 4: mod_base = OTHER; note = 2'-O-methyluridine
  modified_base 5: mod_base = OTHER; note = 2'-O-methyladenosine
  modified_base 6: mod_base = OTHER; note = 2'-fluorouridine
  modified_base 7: mod_base = OTHER; note = 2'-O-methyluridine
  modified_base 8: mod_base = OTHER; note = 2'-fluoroadenosine
  modified_base 9: mod_base = OTHER; note = 2'-fluoroguanosine
  modified_base 10: mod_base = OTHER; note = 2'-O-methyladenosine
  modified_base 11: mod_base = OTHER; note = 2'-O-methyluridine
  modified_base 12: mod_base = OTHER; note = 2'-O-methyladenosine
  modified_base 13: mod_base = OTHER; note = 2'-O-methylcytidine
  modified_base 14: mod_base = OTHER; note = 2'-fluorouridine
  modified_base 15: mod_base = OTHER; note = 2'-O-methylguanosine
  modified_base 16: mod_base = OTHER; note = 2'-fluoroadenosine
  modified_base 17: mod_base = OTHER; note = 2'-O-methylcytidine
  modified_base 18: mod_base = OTHER; note = 2'-O-methylcytidine
  modified_base 19: mod_base = OTHER; note = 2'-O-methyluridine with phosphorothioate linkage
  modified_base 20: mod_base = OTHER; note = 2'-O-methyluridine with phosphorothioate linkage
  modified_base 21: mod_base = OTHER; note = 2'-O-methyluridine
ttatattagatactgaccttt

SEQ ID NO: 1125 - RNA, 21 nt, synthetic construct
  source 1..21: mol_type = other RNA
  modified_base 1: mod_base = OTHER; note = 5'-vinyl-phosphonate-2'-O-methyluridine with phosphorothioate linkage
  modified_base 2: mod_base = OTHER; note = 2'-fluoroadenosine with phosphorothioate linkage
  modified_base 3: mod_base = OTHER; note = 2'-O-methyladenosine
  modified_base 4: mod_base = OTHER; note = 2'-O-methylguanosine
  modified_base 5: mod_base = OTHER; note = 2'-O-methylguanosine
  modified_base 6: mod_base = OTHER; note = 2'-fluoroguanosine
  modified_base 7: mod_base = OTHER; note = 2'-O-methyluridine
  modified_base 8: mod_base = OTHER; note = 2'-fluoroguanosine
  modified_base 9: mod_base = OTHER; note = 2'-fluoroguanosine
  modified_base 10: mod_base = OTHER; note = 2'-O-methyladenosine
  modified_base 11: mod_base = OTHER; note = 2'-O-methylguanosine
  modified_base 12: mod_base = OTHER; note = 2'-O-methylguanosine
  modified_base 13: mod_base = OTHER; note = 2'-O-methyladenosine
  modified_base 14: mod_base = OTHER; note = 2'-fluoroadenosine
  modified_base 15: mod_base = OTHER; note = 2'-O-methyladenosine
  modified_base 16: mod_base = OTHER; note = 2'-fluorouridine
  modified_base 17: mod_base = OTHER; note = 2'-O-methyluridine
  modified_base 18: mod_base = OTHER; note = 2'-O-methylcytidine
  modified_base 19: mod_base = OTHER; note = 2'-O-methylcytidine with phosphorothioate linkage
  modified_base 20: mod_base = OTHER; note = 2'-O-methyluridine with phosphorothioate linkage
  modified_base 21: mod_base = OTHER; note = 2'-O-methyluridine
taagggtggaggaaattcctt

SEQ ID NO: 1126 - RNA, 21 nt, synthetic construct
  source 1..21: mol_type = other RNA
  modified_base 1: mod_base = OTHER; note = 5'-vinyl-phosphonate-2'-O-methyluridine with phosphorothioate linkage
  modified_base 2: mod_base = OTHER; note = 2'-fluoroadenosine with phosphorothioate linkage
  modified_base 3: mod_base = OTHER; note = 2'-O-methylcytidine
  modified_base 4: mod_base = OTHER; note = 2'-O-methyladenosine
  modified_base 5: mod_base = OTHER; note = 2'-O-methylcytidine
  modified_base 6: mod_base = OTHER; note = 2'-fluoroguanosine
  modified_base 7: mod_base = OTHER; note = 2'-O-methyluridine
  modified_base 8: mod_base = OTHER; note = 2'-fluorocytidine
  modified_base 9: mod_base = OTHER; note = 2'-fluoroadenosine
  modified_base 10: mod_base = OTHER; note = 2'-O-methyladenosine
  modified_base 11: mod_base = OTHER; note = 2'-O-methyladenosine
  modified_base 12: mod_base = OTHER; note = 2'-O-methylguanosine
  modified_base 13: mod_base = OTHER; note = 2'-O-methylguanosine
  modified_base 14: mod_base = OTHER; note = 2'-fluorouridine
  modified_base 15: mod_base = OTHER; note = 2'-O-methylguanosine
  modified_base 16: mod_base = OTHER; note = 2'-fluoroadenosine
  modified_base 17: mod_base = OTHER; note = 2'-O-methyladenosine
  modified_base 18: mod_base = OTHER; note = 2'-O-methyluridine
  modified_base 19: mod_base = OTHER; note = 2'-O-methylcytidine with phosphorothioate linkage
  modified_base 20: mod_base = OTHER; note = 2'-O-methyluridine with phosphorothioate linkage
  modified_base 21: mod_base = OTHER; note = 2'-O-methyluridine
tacacgtcaaaggtgaatctt

SEQ ID NO: 1127 - RNA, 21 nt, synthetic construct
  source 1..21: mol_type = other RNA
  modified_base 1: mod_base = OTHER; note = 5'-vinyl-phosphonate-2'-O-methyluridine with phosphorothioate linkage
  modified_base 2: mod_base = OTHER; note = 2'-fluorocytidine with phosphorothioate linkage
  modified_base 3: mod_base = OTHER; note = 2'-O-methyladenosine
  modified_base 4: mod_base = OTHER; note = 2'-O-methylguanosine
  modified_base 5: mod_base = OTHER; note = 2'-O-methylguanosine
  modified_base 6: mod_base = OTHER; note = 2'-fluorocytidine
  modified_base 7: mod_base = OTHER; note = 2'-O-methyladenosine
  modified_base 8: mod_base = OTHER; note = 2'-fluorocytidine
  modified_base 9: mod_base = OTHER; note = 2'-fluoroguanosine
  modified_base 10: mod_base = OTHER; note = 2'-O-methyluridine
  modified_base 11: mod_base = OTHER; note = 2'-O-methylguanosine
  modified_base 12: mod_base = OTHER; note = 2'-O-methyluridine
  modified_base 13: mod_base = OTHER; note = 2'-O-methylcytidine
  modified_base 14: mod_base = OTHER; note = 2'-fluoroadenosine
  modified_base 15: mod_base = OTHER; note = 2'-O-methyluridine
  modified_base 16: mod_base = OTHER; note = 2'-fluorocytidine
  modified_base 17: mod_base = OTHER; note = 2'-O-methylcytidine
  modified_base 18: mod_base = OTHER; note = 2'-O-methyluridine
  modified_base 19: mod_base = OTHER; note = 2'-O-methylcytidine with phosphorothioate linkage
  modified_base 20: mod_base = OTHER; note = 2'-O-methyluridine with phosphorothioate linkage
  modified_base 21: mod_base = OTHER; note = 2'-O-methyluridine
tcaggcacgtgtcatcctctt

SEQ ID NO: 1128 - RNA, 21 nt, synthetic construct
  source 1..21: mol_type = other RNA
  modified_base 1: mod_base = OTHER; note = 5'-vinyl-phosphonate-2'-O-methyluridine with phosphorothioate linkage
  modified_base 2: mod_base = OTHER; note = 2'-fluoroadenosine with phosphorothioate linkage
  modified_base 3: mod_base = OTHER; note = 2'-O-methyladenosine
  modified_base 4: mod_base = OTHER; note = 2'-O-methylguanosine
  modified_base 5: mod_base = OTHER; note = 2'-O-methyluridine
  modified_base 6: mod_base = OTHER; note = 2'-fluorocytidine
  modified_base 7: mod_base = OTHER; note = 2'-O-methyladenosine
  modified_base 8: mod_base = OTHER; note = 2'-fluorocytidine
  modified_base 9: mod_base = OTHER; note = 2'-fluoroadenosine
  modified_base 10: mod_base = OTHER; note = 2'-O-methyladenosine
  modified_base 11: mod_base = OTHER; note = 2'-O-methylcytidine
  modified_base 12: mod_base = OTHER; note = 2'-O-methyluridine
  modified_base 13: mod_base = OTHER; note = 2'-O-methylcytidine
  modified_base 14: mod_base = OTHER; note = 2'-fluoroadenosine
  modified_base 15: mod_base = OTHER; note = 2'-O-methyluridine
  modified_base 16: mod_base = OTHER; note = 2'-fluoroadenosine
  modified_base 17: mod_base = OTHER; note = 2'-O-methylguanosine
  modified_base 18: mod_base = OTHER; note = 2'-O-methyladenosine
  modified_base 19: mod_base = OTHER; note = 2'-O-methylguanosine with phosphorothioate linkage
  modified_base 20: mod_base = OTHER; note = 2'-O-methyluridine with phosphorothioate linkage
  modified_base 21: mod_base = OTHER; note = 2'-O-methyladenosine
taagtcacaactcatagagta

SEQ ID NO: 1129 - RNA, 21 nt, synthetic construct
  source 1..21: mol_type = other RNA
  modified_base 1: mod_base = OTHER; note = 5'-vinyl-phosphonate-2'-O-methyluridine with phosphorothioate linkage
  modified_base 2: mod_base = OTHER; note = 2'-fluoroguanosine with phosphorothioate linkage
  modified_base 3: mod_base = OTHER; note = 2'-O-methylcytidine
  modified_base 4: mod_base = OTHER; note = 2'-O-methyladenosine
  modified_base 5: mod_base = OTHER; note = 2'-O-methylguanosine
  modified_base 6: mod_base = OTHER; note = 2'-fluorouridine
  modified_base 7: mod_base = OTHER; note = 2'-O-methyluridine
  modified_base 8: mod_base = OTHER; note = 2'-fluorocytidine
  modified_base 9: mod_base = OTHER; note = 2'-fluorocytidine
  modified_base 10: mod_base = OTHER; note = 2'-O-methyladenosine
  modified_base 11: mod_base = OTHER; note = 2'-O-methyluridine
  modified_base 12: mod_base = OTHER; note = 2'-O-methylcytidine
  modified_base 13: mod_base = OTHER; note = 2'-O-methylcytidine
  modified_base 14: mod_base = OTHER; note = 2'-fluorouridine
  modified_base 15: mod_base = OTHER; note = 2'-O-methylcytidine
  modified_base 16: mod_base = OTHER; note = 2'-fluorocytidine
  modified_base 17: mod_base = OTHER; note = 2'-O-methyluridine
  modified_base 18: mod_base = OTHER; note = 2'-O-methylcytidine
  modified_base 19: mod_base = OTHER; note = 2'-O-methyluridine with phosphorothioate linkage
  modified_base 20: mod_base = OTHER; note = 2'-O-methyladenosine with phosphorothioate linkage
  modified_base 21: mod_base = OTHER; note = 2'-O-methylguanosine
tgcagttccatcctcctctag

SEQ ID NO: 1130 - RNA, 21 nt, synthetic construct
  source 1..21: mol_type = other RNA
  modified_base 1: mod_base = OTHER; note = 5'-vinyl-phosphonate-2'-O-methyluridine with phosphorothioate linkage
  modified_base 2: mod_base = OTHER; note = 2'-fluoroadenosine with phosphorothioate linkage
  modified_base 3: mod_base = OTHER; note = 2'-O-methylcytidine
  modified_base 4: mod_base = OTHER; note = 2'-O-methyladenosine
  modified_base 5: mod_base = OTHER; note = 2'-O-methylcytidine
  modified_base 6: mod_base = OTHER; note = 2'-fluoroguanosine
  modified_base 7: mod_base = OTHER; note = 2'-O-methyluridine
  modified_base 8: mod_base = OTHER; note = 2'-fluorocytidine
  modified_base 9: mod_base = OTHER; note = 2'-fluoroadenosine
  modified_base 10: mod_base = OTHER; note = 2'-O-methyladenosine
  modified_base 11: mod_base = OTHER; note = 2'-O-methyladenosine
  modified_base 12: mod_base = OTHER; note = 2'-O-methylguanosine
  modified_base 13: mod_base = OTHER; note = 2'-O-methylguanosine
  modified_base 14: mod_base = OTHER; note = 2'-fluorouridine
  modified_base 15: mod_base = OTHER; note = 2'-O-methylguanosine
  modified_base 16: mod_base = OTHER; note = 2'-fluoroadenosine
  modified_base 17: mod_base = OTHER; note = 2'-O-methyladenosine
  modified_base 18: mod_base = OTHER; note = 2'-O-methyluridine
  modified_base 19: mod_base = OTHER; note = 2'-O-methylcytidine with phosphorothioate linkage
  modified_base 20: mod_base = OTHER; note = 2'-O-methylguanosine with phosphorothioate linkage
  modified_base 21: mod_base = OTHER; note = 2'-O-methylguanosine
tacacgtcaaaggtgaatcgg

SEQ ID NO: 1131 - RNA, 21 nt, synthetic construct
  source 1..21: mol_type = other RNA
  modified_base 1: mod_base = OTHER; note = 5'-vinyl-phosphonate-2'-O-methyluridine with phosphorothioate linkage
  modified_base 2: mod_base = OTHER; note = 2'-fluorouridine with phosphorothioate linkage
  modified_base 3: mod_base = OTHER; note = 2'-O-methyladenosine
  modified_base 4: mod_base = OTHER; note = 2'-O-methyluridine
  modified_base 5: mod_base = OTHER; note = 2'-O-methyluridine
  modified_base 6: mod_base = OTHER; note = 2'-fluoroadenosine
  modified_base 7: mod_base = OTHER; note = 2'-O-methylguanosine
  modified_base 8: mod_base = OTHER; note = 2'-fluoroadenosine
  modified_base 9: mod_base = OTHER; note = 2'-fluorouridine
  modified_base 10: mod_base = OTHER; note = 2'-O-methyladenosine
  modified_base 11: mod_base = OTHER; note = 2'-O-methylcytidine
  modified_base 12: mod_base = OTHER; note = 2'-O-methyluridine
  modified_base 13: mod_base = OTHER; note = 2'-O-methylguanosine
  modified_base 14: mod_base = OTHER; note = 2'-fluoroadenosine
  modified_base 15: mod_base = OTHER; note = 2'-O-methylcytidine
  modified_base 16: mod_base = OTHER; note = 2'-fluorocytidine
  modified_base 17: mod_base = OTHER; note = 2'-O-methyluridine
  modified_base 18: mod_base = OTHER; note = 2'-O-methylguanosine
  modified_base 19: mod_base = OTHER; note = 2'-O-methyladenosine with phosphorothioate linkage
  modified_base 20: mod_base = OTHER; note = 2'-O-methyluridine with phosphorothioate linkage
  modified_base 21: mod_base = OTHER; note = 2'-O-methyluridine
ttattagatactgacctgatt

SEQ ID NO: 1132 - RNA, 23 nt, Homo sapiens
  source 1..23: mol_type = genomic RNA
ccagctcagcagtgtctcgttcc

SEQ ID NO: 1133 - RNA, 23 nt, Homo sapiens
  source 1..23: mol_type = genomic RNA
cagctcagcagtgtctcgttccc

SEQ ID NO: 1134 - RNA, 23 nt, Homo sapiens
  source 1..23: mol_type = genomic RNA
ggggacggtagcagaccgacatc

SEQ ID NO: 1135 - RNA, 23 nt, Homo sapiens
  source 1..23: mol_type = genomic RNA
ggacggtagcagaccgacatcct

SEQ ID NO: 1136 - RNA, 23 nt, Homo sapiens
  source 1..23: mol_type = genomic RNA
gacggtagcagaccgacatcctt

SEQ ID NO: 1137 - RNA, 23 nt, Homo sapiens
  source 1..23: mol_type = genomic RNA
gtagcagaccgacatccttctgg

SEQ ID NO: 1138 - RNA, 23 nt, Homo sapiens
  source 1..23: mol_type = genomic RNA
tagcagaccgacatccttctggg

SEQ ID NO: 1139 - RNA, 23 nt, Homo sapiens
  source 1..23: mol_type = genomic RNA
cttccatgcaactgtccatcacg

SEQ ID NO: 1140 - RNA, 23 nt, Homo sapiens
  source 1..23: mol_type = genomic RNA
ttccatgcaactgtccatcacgg

SEQ ID NO: 1141 - RNA, 23 nt, Homo sapiens
  source 1..23: mol_type = genomic RNA
tccatgcaactgtccatcacggc

SEQ ID NO: 1142 - RNA, 23 nt, Homo sapiens
  source 1..23: mol_type = genomic RNA
gcaactgtccatcacggctgcaa

SEQ ID NO: 1143 - RNA, 23 nt, Homo sapiens
  source 1..23: mol_type = genomic RNA
caactgtccatcacggctgcaac

SEQ ID NO: 1144 - RNA, 23 nt, Homo sapiens
  source 1..23: mol_type = genomic RNA
ctgtccatcacggctgcaactga

SEQ ID NO: 1145 - RNA, 23 nt, Homo sapiens
  source 1..23: mol_type = genomic RNA
ccatcacggctgcaactgaaatc

SEQ ID NO: 1146 - RNA, 23 nt, Homo sapiens
  source 1..23: mol_type = genomic RNA
gctgggacacagcgcaccagaag

SEQ ID NO: 1147 - RNA, 23 nt, Homo sapiens
  source 1..23: mol_type = genomic RNA
gggacacagcgcaccagaagcta

SEQ ID NO: 1148 - RNA, 23 nt, Homo sapiens
  source 1..23: mol_type = genomic RNA
acacagcgcaccagaagctaaag

SEQ ID NO: 1149 - RNA, 21 nt, Homo sapiens
  source 1..21: mol_type = genomic RNA
aagccacattctacgggctct

SEQ ID NO: 1150 - RNA, 21 nt, Homo sapiens
  source 1..21: mol_type = genomic RNA
aagaaagtactcagggagctc

SEQ ID NO: 1151 - RNA, 21 nt, Homo sapiens
  source 1..21: mol_type = genomic RNA
aagtctatacccttacctgaa

SEQ ID NO: 1152 - RNA, 21 nt, Homo sapiens
  source 1..21: mol_type = genomic RNA
gagctgctagccaaagcattg

SEQ ID NO: 1153 - RNA, 21 nt, Homo sapiens
  source 1..21: mol_type = genomic RNA
aaggagtggagtgctgtcata

SEQ ID NO: 1154 - RNA, 21 nt, Homo sapiens
  source 1..21: mol_type = genomic RNA
aaggccaagatcaagatgtcc

SEQ ID NO: 1155 - RNA, 23 nt, Homo sapiens
  source 1..23: mol_type = genomic RNA
accttgagatctgtcttcatacc

SEQ ID NO: 1156 - RNA, 23 nt, Homo sapiens
  source 1..23: mol_type = genomic RNA
ttaccttgagatctgtcttcata

SEQ ID NO: 1157 - RNA, 21 nt, Homo sapiens
  source 1..21: mol_type = genomic RNA
cccctcaaactaacaaaaaca

SEQ ID NO: 1158 - RNA, 21 nt, Homo sapiens
  source 1..21: mol_type = genomic RNA
ccctcaaactaacaaaaacat

SEQ ID NO: 1159 - RNA, 21 nt, Homo sapiens
  source 1..21: mol_type = genomic RNA
ctcaaactaacaaaaacattt

SEQ ID NO: 1160 - RNA, 21 nt, Homo sapiens
  source 1..21: mol_type = genomic RNA
aactaacaaaaacatttccaa

SEQ ID NO: 1161 - RNA, 21 nt, Homo sapiens
  source 1..21: mol_type = genomic RNA
aacaaaaacatttccaataaa

SEQ ID NO: 1162 - RNA, 21 nt, Homo sapiens
  source 1..21: mol_type = genomic RNA
ttccaataaaaatatcaaata

SEQ ID NO: 1163 - RNA, 21 nt, Homo sapiens
  source 1..21: mol_type = genomic RNA
tccaataaaaatatcaaatat

SEQ ID NO: 1164 - RNA, 21 nt, Homo sapiens
  source 1..21: mol_type = genomic RNA
agccaaagcattggagaccct

SEQ ID NO: 1165 - RNA, 21 nt, Homo sapiens
  source 1..21: mol_type = genomic RNA
ctcaggtcagtatctaatata

SEQ ID NO: 1166 - RNA, 21 nt, Homo sapiens
  source 1..21: mol_type = genomic RNA
gaatgtcaaagccacattcta

SEQ ID NO: 1167 - RNA, 21 nt, Homo sapiens
  source 1..21: mol_type = genomic RNA
gggctctactctatgagttgt

SEQ ID NO: 1168 - RNA, 21 nt, Homo sapiens
  source 1..21: mol_type = genomic RNA
ctctatgagttgtgactttca

SEQ ID NO: 1169 - RNA, 21 nt, Homo sapiens
  source 1..21: mol_type = genomic RNA
tctatgagttgtgactttcaa

SEQ ID NO: 1170 - RNA, 21 nt, Homo sapiens
  source 1..21: mol_type = genomic RNA
ttggcccaaagaaagtactca

SEQ ID NO: 1171 - RNA, 21 nt, Homo sapiens
  source 1..21: mol_type = genomic RNA
gggccatatgttgctgggaat

SEQ ID NO: 1172 - RNA, 21 nt, Homo sapiens
  source 1..21: mol_type = genomic RNA
gacccactgcaaagactatga

SEQ ID NO: 1173 - RNA, 21 nt, Homo sapiens
  source 1..21: mol_type = genomic RNA
aagactatgacagcatcaaat

SEQ ID NO: 1174 - RNA, 21 nt, Homo sapiens
  source 1..21: mol_type = genomic RNA
gactatgacagcatcaaattt

SEQ ID NO: 1175 - RNA, 21 nt, Homo sapiens
  source 1..21: mol_type = genomic RNA
acctgaagaatgctgttcttt

SEQ ID NO: 1176 - RNA, 21 nt, Homo sapiens
  source 1..21: mol_type = genomic RNA
acctgaagaatgctgttcttt

SEQ ID NO: 1177 - RNA, 21 nt, Homo sapiens
  source 1..21: mol_type = genomic RNA
gccctgaaaggccaagatcaa

SEQ ID NO: 1178 - RNA, 21 nt, Homo sapiens
  source 1..21: mol_type = genomic RNA
gccctgaaaggccaagatcaa

SEQ ID NO: 1179 - RNA, 21 nt, Homo sapiens
  source 1..21: mol_type = genomic RNA
ctgactgctgctacatctaat

SEQ ID NO: 1180 - RNA, 21 nt, Homo sapiens
  source 1..21: mol_type = genomic RNA
tcaggtcagtatctaatataa

SEQ ID NO: 1181 - RNA, 21 nt, Homo sapiens
  source 1..21: mol_type = genomic RNA
tgggaatttcctccacccttc

SEQ ID NO: 1182 - RNA, 21 nt, Homo sapiens
  source 1..21: mol_type = genomic RNA
ccgattcacctttgacgtgta

SEQ ID NO: 1183 - RNA, 21 nt, Homo sapiens
  source 1..21: mol_type = genomic RNA
tggaggatgacacgtgcctga

SEQ ID NO: 1184 - RNA, 21 nt, Homo sapiens
  source 1..21: mol_type = genomic RNA
tactctatgagttgtgacttt

SEQ ID NO: 1185 - RNA, 21 nt, Homo sapiens
  source 1..21: mol_type = genomic RNA
ctagaggaggatggaactgca

SEQ ID NO: 1186 - RNA, 21 nt, Homo sapiens
  source 1..21: mol_type = genomic RNA
ccgattcacctttgacgtgta

SEQ ID NO: 1187 - RNA, 21 nt, Homo sapiens
  source 1..21: mol_type = genomic RNA
actcaggtcagtatctaatat

SEQ ID NO: 1188 - RNA, 23 nt, synthetic construct
  source 1..23: mol_type = other RNA
  modified_base 1: mod_base = OTHER; note = 5'-vinyl-phosphonate-2'-O-methyluridine with phosphorothioate linkage
  modified_base 2: mod_base = OTHER; note = 2'-fluorocytidine with phosphorothioate linkage
  modified_base 3: mod_base = OTHER; note = 2'-O-methylguanosine
  modified_base 4: mod_base = OTHER; note = 2'-O-methyladenosine
  modified_base 5: mod_base = OTHER; note = 2'-O-methylguanosine
  modified_base 6: mod_base = OTHER; note = 2'-fluorocytidine
  modified_base 7: mod_base = OTHER; note = 2'-O-methyluridine
  modified_base 8: mod_base = OTHER; note = 2'-O-methyluridine
  modified_base 9: mod_base = OTHER; note = 2'-O-methyladenosine
  modified_base 10: mod_base = OTHER; note = 2'-O-methyluridine
  modified_base 11: mod_base = OTHER; note = 2'-O-methyladenosine
  modified_base 12: mod_base = OTHER; note = 2'-O-methyluridine
  modified_base 13: mod_base = OTHER; note = 2'-O-methyluridine
  modified_base 14: mod_base = OTHER; note = 2'-fluoroadenosine
  modified_base 15: mod_base = OTHER; note = 2'-O-methylguanosine
  modified_base 16: mod_base = OTHER; note = 2'-fluoroadenosine
  modified_base 17: mod_base = OTHER; note = 2'-O-methyluridine
  modified_base 18: mod_base = OTHER; note = 2'-O-methyladenosine
  modified_base 19: mod_base = OTHER; note = 2'-O-methylcytidine
  modified_base 20: mod_base = OTHER; note = 2'-O-methyluridine
  modified_base 21: mod_base = OTHER; note = 2'-O-methylguanosine with phosphorothioate linkage
  modified_base 22: mod_base = OTHER; note = 2'-O-methyladenosine with phosphorothioate linkage
  modified_base 23: mod_base = OTHER; note = 2'-O-methylcytidine
tcgagcttatattagatactgac

SEQ ID NO: 1189 - RNA, 23 nt, synthetic construct
  source 1..23: mol_type = other RNA
  modified_base 1: mod_base = OTHER; note = 5'-vinyl-phosphonate-2'-O-methyluridine with phosphorothioate linkage
  modified_base 2: mod_base = OTHER; note = 2'-fluorocytidine with phosphorothioate linkage
  modified_base 3: mod_base = OTHER; note = 2'-O-methyladenosine
  modified_base 4: mod_base = OTHER; note = 2'-O-methyladenosine
  modified_base 5: mod_base = OTHER; note = 2'-O-methyladenosine
  modified_base 6: mod_base = OTHER; note = 2'-fluorocytidine
  modified_base 7: mod_base = OTHER; note = 2'-O-methyluridine
  modified_base 8: mod_base = OTHER; note = 2'-O-methylcytidine
  modified_base 9: mod_base = OTHER; note = 2'-O-methylcytidine
  modified_base 10: mod_base = OTHER; note = 2'-O-methylguanosine
  modified_base 11: mod_base = OTHER; note = 2'-O-methyladenosine
  modified_base 12: mod_base = OTHER; note = 2'-O-methylguanosine
  modified_base 13: mod_base = OTHER; note = 2'-O-methylcytidine
  modified_base 14: mod_base = OTHER; note = 2'-fluorouridine
  modified_base 15: mod_base = OTHER; note = 2'-O-methyluridine
  modified_base 16: mod_base = OTHER; note = 2'-fluoroadenosine
  modified_base 17: mod_base = OTHER; note = 2'-O-methyluridine
  modified_base 18: mod_base = OTHER; note = 2'-O-methyladenosine
  modified_base 19: mod_base = OTHER; note = 2'-O-methyluridine
  modified_base 20: mod_base = OTHER; note = 2'-O-methyluridine
  modified_base 21: mod_base = OTHER; note = 2'-O-methyladenosine with phosphorothioate linkage
  modified_base 22: mod_base = OTHER; note = 2'-O-methylguanosine with phosphorothioate linkage
  modified_base 23: mod_base = OTHER; note = 2'-O-methyladenosine
tcaaactccgagcttatattaga

SEQ ID NO: 1190 - RNA, 23 nt, synthetic construct
  source 1..23: mol_type = other RNA
  modified_base 1: mod_base = OTHER; note = 5'-vinyl-phosphonate-2'-O-methyluridine with phosphorothioate linkage
  modified_base 2: mod_base = OTHER; note = 2'-fluorocytidine with phosphorothioate linkage
  modified_base 3: mod_base = OTHER; note = 2'-O-methylguanosine
  modified_base 4: mod_base = OTHER; note = 2'-O-methyladenosine
  modified_base 5: mod_base = OTHER; note = 2'-O-methylguanosine
  modified_base 6: mod_base = OTHER; note = 2'-fluorocytidine
  modified_base 7: mod_base = OTHER; note = 2'-O-methyluridine
  modified_base 8: mod_base = OTHER; note = 2'-O-methyluridine
  modified_base 9: mod_base = OTHER; note = 2'-O-methyladenosine
  modified_base 10: mod_base = OTHER; note = 2'-O-methyluridine
  modified_base 11: mod_base = OTHER; note = 2'-O-methyladenosine
  modified_base 12: mod_base = OTHER; note = 2'-O-methyluridine
  modified_base 13: mod_base = OTHER; note = 2'-O-methyluridine
  modified_base 14: mod_base = OTHER; note = 2'-fluoroadenosine
  modified_base 15: mod_base = OTHER; note = 2'-O-methylguanosine
  modified_base 16: mod_base = OTHER; note = 2'-O-methyladenosine
  modified_base 17: mod_base = OTHER; note = 2'-O-methyluridine
  modified_base 18: mod_base = OTHER; note = 2'-O-methyladenosine
  modified_base 19: mod_base = OTHER; note = 2'-O-methylcytidine
  modified_base 20: mod_base = OTHER; note = 2'-O-methyluridine
  modified_base 21: mod_base = OTHER; note = 2'-O-methylguanosine with phosphorothioate linkage
  modified_base 22: mod_base = OTHER; note = 2'-O-methyladenosine with phosphorothioate linkage
  modified_base 23: mod_base = OTHER; note = 2'-O-methylcytidine
tcgagcttatattagatactgac

SEQ ID NO: 1191 - RNA, 23 nt, synthetic construct
  source 1..23: mol_type = other RNA
  modified_base 1: mod_base = OTHER; note = 5'-vinyl-phosphonate-2'-O-methyluridine with phosphorothioate linkage
  modified_base 2: mod_base = OTHER; note = 2'-fluorouridine with phosphorothioate linkage
  modified_base 3: mod_base = OTHER; note = 2'-O-methyladenosine
  modified_base 4: mod_base = OTHER; note = 2'-O-methyluridine
  modified_base 5: mod_base = OTHER; note = 2'-O-methylcytidine
  modified_base 6: mod_base = OTHER; note = 2'-fluorouridine
  modified_base 7: mod_base = OTHER; note = 2'-O-methyladenosine
  modified_base 8: mod_base = OTHER; note = 2'-O-methylguanosine
  modified_base 9: mod_base = OTHER; note = 2'-O-methylcytidine
  modified_base 10: mod_base = OTHER; note = 2'-O-methylcytidine
  modified_base 11: mod_base = OTHER; note = 2'-O-methyluridine
  modified_base 12: mod_base = OTHER; note = 2'-O-methylguanosine
  modified_base 13: mod_base = OTHER; note = 2'-O-methyluridine
  modified_base 14: mod_base = OTHER; note = 2'-fluoroadenosine
  modified_base 15: mod_base = OTHER; note = 2'-O-methylcytidine
  modified_base 16: mod_base = OTHER; note = 2'-O-methyluridine
  modified_base 17: mod_base = OTHER; note = 2'-O-methylguanosine
  modified_base 18: mod_base = OTHER; note = 2'-O-methyluridine
  modified_base 19: mod_base = OTHER; note = 2'-O-methylcytidine
  modified_base 20: mod_base = OTHER; note = 2'-O-methyluridine
  modified_base 21: mod_base = OTHER; note = 2'-O-methylguanosine with phosphorothioate linkage
  modified_base 22: mod_base = OTHER; note = 2'-O-methylcytidine with phosphorothioate linkage
  modified_base 23: mod_base = OTHER; note = 2'-O-methyladenosine
ttatctagcctgtactgtctgca

SEQ ID NO: 1192 - RNA, 21 nt, synthetic construct
  source 1..21: mol_type = other RNA
  modified_base 1: mod_base = OTHER; note = 2'-O-methylcytidine with phosphorothioate linkage
  modified_base 2: mod_base = OTHER; note = 2'-O-methyladenosine with phosphorothioate linkage
  modified_base 3: mod_base = OTHER; note = 2'-O-methylguanosine
  modified_base 4: mod_base = OTHER; note = 2'-O-methyladenosine
  modified_base 5: mod_base = OTHER; note = 2'-fluorocytidine
  modified_base 6: mod_base = OTHER; note = 2'-O-methyladenosine
  modified_base 7: mod_base = OTHER; note = 2'-O-methylguanosine
  modified_base 8: mod_base = OTHER; note = 2'-O-methyluridine
  modified_base 9: mod_base = OTHER; note = 2'-fluoroadenosine
  modified_base 10: mod_base = OTHER; note = 2'-fluorocytidine
  modified_base 11: mod_base = OTHER; note = 2'-fluoroadenosine
  modified_base 12: mod_base = OTHER; note = 2'-O-methylguanosine
  modified_base 13: mod_base = OTHER; note = 2'-O-methylguanosine
  modified_base 14: mod_base = OTHER; note = 2'-O-methylcytidine
  modified_base 15: mod_base = OTHER; note = 2'-O-methyluridine
  modified_base 16: mod_base = OTHER; note = 2'-O-methyladenosine
  modified_base 17: mod_base = OTHER; note = 2'-O-methylguanosine
  modified_base 18: mod_base = OTHER; note = 2'-O-methyladenosine
  modified_base 19: mod_base = OTHER; note = 2'-O-methyluridine
  modified_base 20: mod_base = OTHER; note = 2'-O-methyladenosine
  modified_base 21: mod_base = OTHER; note = 2'-O-methyladenosine
cagacagtacaggctagataa

SEQ ID NO: 1193 - RNA, 21 nt, synthetic construct
  source 1..21: mol_type = other RNA
  modified_base 1: mod_base = OTHER; note = 2'-O-methylcytidine with phosphorothioate linkage
  modified_base 2: mod_base = OTHER; note = 2'-O-methyladenosine with phosphorothioate linkage
  modified_base 3: mod_base = OTHER; note = 2'-O-methylguanosine
  modified_base 4: mod_base = OTHER; note = 2'-O-methyluridine
  modified_base 5: mod_base = OTHER; note = 2'-O-methyladenosine
  modified_base 6: mod_base = OTHER; note = 2'-O-methyluridine
  modified_base 7: mod_base = OTHER; note = 2'-fluorocytidine
  modified_base 8: mod_base = OTHER; note = 2'-O-methyluridine
  modified_base 9: mod_base = OTHER; note = 2'-fluoroadenosine
  modified_base 10: mod_base = OTHER; note = 2'-fluoroadenosine
  modified_base 11: mod_base = OTHER; note = 2'-fluorouridine
  modified_base 12: mod_base = OTHER; note = 2'-O-methyladenosine
  modified_base 13: mod_base = OTHER; note = 2'-O-methyluridine
  modified_base 14: mod_base = OTHER; note = 2'-O-methyladenosine
  modified_base 15: mod_base = OTHER; note = 2'-O-methyladenosine
  modified_base 16: mod_base = OTHER; note = 2'-O-methylguanosine
  modified_base 17: mod_base = OTHER; note = 2'-O-methylcytidine
  modified_base 18: mod_base = OTHER; note = 2'-O-methyluridine
  modified_base 19: mod_base = OTHER; note = 2'-O-methylcytidine
  modified_base 20: mod_base = OTHER; note = 2'-O-methylguanosine
  modified_base 21: mod_base = OTHER; note = 2'-O-methyladenosine attached to N-acetylgalactosamine-triethylene glycol
cagtatctaatataagctcga

SEQ ID NO: 1194 - RNA, 21 nt, synthetic construct
  source 1..21: mol_type = other RNA
  modified_base 1: mod_base = OTHER; note = 2'-O-methylcytidine with phosphorothioate linkage
  modified_base 2: mod_base = OTHER; note = 2'-O-methyladenosine with phosphorothioate linkage
  modified_base 3: mod_base = OTHER; note = 2'-O-methylguanosine
  modified_base 4: mod_base = OTHER; note = 2'-O-methyladenosine
  modified_base 5: mod_base = OTHER; note = 2'-fluorocytidine
  modified_base 6: mod_base = OTHER; note = 2'-O-methyladenosine
  modified_base 7: mod_base = OTHER; note = 2'-O-methylguanosine
  modified_base 8: mod_base = OTHER; note = 2'-O-methyluridine
  modified_base 9: mod_base = OTHER; note = 2'-fluoroadenosine
  modified_base 10: mod_base = OTHER; note = 2'-fluorocytidine
  modified_base 11: mod_base = OTHER; note = 2'-fluoroadenosine
  modified_base 12: mod_base = OTHER; note = 2'-O-methylguanosine
  modified_base 13: mod_base = OTHER; note = 2'-O-methylguanosine
  modified_base 14: mod_base = OTHER; note = 2'-O-methylcytidine
  modified_base 15: mod_base = OTHER; note = 2'-O-methyluridine
  modified_base 16: mod_base = OTHER; note = 2'-O-methyladenosine
  modified_base 17: mod_base = OTHER; note = 2'-O-methylguanosine
  modified_base 18: mod_base = OTHER; note = 2'-O-methyladenosine
  modified_base 19: mod_base = OTHER; note = 2'-O-methyluridine
  modified_base 20: mod_base = OTHER; note = 2'-O-methyladenosine
  modified_base 21: mod_base = OTHER; note = 2'-O-methyladenosine attached to N-acetylgalactosamine-triethylene glycol
cagacagtacaggctagataa

SEQ ID NO: 1195 - RNA, 21 nt, synthetic construct
  source 1..21: mol_type = other RNA
  modified_base 1: mod_base = OTHER; note = 2'-O-methyluridine with phosphorothioate linkage
  modified_base 2: mod_base = OTHER; note = 2'-O-methyladenosine with phosphorothioate linkage
  modified_base 3: mod_base = OTHER; note = 2'-O-methyladenosine
  modified_base 4: mod_base = OTHER; note = 2'-O-methyluridine
  modified_base 5: mod_base = OTHER; note = 2'-O-methyladenosine
  modified_base 6: mod_base = OTHER; note = 2'-O-methyluridine
  modified_base 7: mod_base = OTHER; note = 2'-fluoroadenosine
  modified_base 8: mod_base = OTHER; note = 2'-O-methyladenosine
  modified_base 9: mod_base = OTHER; note = 2'-fluoroguanosine
  modified_base 10: mod_base = OTHER; note = 2'-fluorocytidine
  modified_base 11: mod_base = OTHER; note = 2'-fluorouridine
  modified_base 12: mod_base = OTHER; note = 2'-O-methylcytidine
  modified_base 13: mod_base = OTHER; note = 2'-O-methylguanosine
  modified_base 14: mod_base = OTHER; note = 2'-O-methylguanosine
  modified_base 15: mod_base = OTHER; note = 2'-O-methyladenosine
  modified_base 16: mod_base = OTHER; note = 2'-O-methylguanosine
  modified_base 17: mod_base = OTHER; note = 2'-O-methyluridine
  modified_base 18: mod_base = OTHER; note = 2'-O-methyluridine
  modified_base 19: mod_base = OTHER; note = 2'-O-methyluridine
  modified_base 20: mod_base = OTHER; note = 2'-O-methylguanosine
  modified_base 21: mod_base = OTHER; note = 2'-O-methyladenosine attached to N-acetylgalactosamine-triethylene glycol
taatataagctcggagtttga

SEQ ID NO: 1196 - RNA, 21 nt, synthetic construct
  source 1..21: mol_type = other RNA
  modified_base 1: mod_base = OTHER; note = 2'-O-methyladenosine with phosphorothioate linkage
  modified_base 2: mod_base = OTHER; note = 2'-O-methylguanosine with phosphorothioate linkage
  modified_base 3: mod_base = OTHER; note = 2'-O-methyladenosine
  modified_base 4: mod_base = OTHER; note = 2'-O-methylcytidine
  modified_base 5: mod_base = OTHER; note = 2'-O-methyladenosine
  modified_base 6: mod_base = OTHER; note = 2'-O-methylguanosine
  modified_base 7: mod_base = OTHER; note = 2'-fluorouridine
  modified_base 8: mod_base = OTHER; note = 2'-O-methyladenosine
  modified_base 9: mod_base = OTHER; note = 2'-fluorocytidine
  modified_base 10: mod_base = OTHER; note = 2'-fluoroadenosine
  modified_base 11: mod_base = OTHER; note = 2'-fluoroguanosine
  modified_base 12: mod_base = OTHER; note = 2'-O-methylguanosine
  modified_base 13: mod_base = OTHER; note = 2'-O-methylcytidine
  modified_base 14: mod_base = OTHER; note = 2'-O-methyluridine
  modified_base 15: mod_base = OTHER; note = 2'-O-methyladenosine
  modified_base 16: mod_base = OTHER; note = 2'-O-methylguanosine
  modified_base 17: mod_base = OTHER; note = 2'-O-methyladenosine
  modified_base 18: mod_base = OTHER; note = 2'-O-methyluridine
  modified_base 19: mod_base = OTHER; note = 2'-O-methyladenosine
  modified_base 20: mod_base = OTHER; note = 2'-O-methyladenosine
  modified_base 21: mod_base = OTHER; note = 2'-O-methyladenosine attached to N-acetylgalactosamine-triethylene glycol
agacagtacaggctagataaa

SEQ ID NO: 1197 - RNA, 19 nt, synthetic construct
  source 1..19: mol_type = other RNA
tcaggtcagtatctaataa

SEQ ID NO: 1198 - RNA, 19 nt, synthetic construct
  source 1..19: mol_type = other RNA
ctctatgagttgtgactta

SEQ ID NO: 1199 - RNA, 19 nt, synthetic construct
  source 1..19: mol_type = other RNA
agaggaggatggaactgca
